United States Patent Application Publication US 2025/0205292 A1 - sequence listing, part 7

SEQ ID NO: 10 - DNA, 3323803 bp, Lactobacillus plantarum (residues 1-1,661,902 of 3,323,803)
  source 1..3323803: mol_type = genomic DNA
gtgctggaacgtaatgacttatggaatctcattaagttctctatggaacaagatctgtccaagatcacgtttcaaacgtttgtcgaaccggcaaaaccactccaactcgataaagcccaaatgacgatcgaagtcccaacacaacttcatcgtgactattgggagaaaaacttggccgcaaagttcacggacattgcgatgcaagcgactaacgagcagattcggccggtcatgataacggaagaagaacgtcagcaacttacgagagacaaggactcgcaagtgactaccggtaacgttgcgggacaacaaccaacaaccgcaactacccccacatttatgcgggaaacgaaactcaacccgaaatacacttttgatactttcgtgatcggtaaaggcaatcaaatggcccatgccgctgcgttagttgtgtcggaagaacccggcaccatgtataatccgttgtttttctacgggggcgttggtctgggaaaaacccacctaatgcacgctatcggtaacaaattgttagaaaccgatccgactagtaacattaaatatgtgactagcgaatcttttacgaatgaattaattaatgccattcaaactaaaaaacaggaggcgttccgcgaagaatatcggaacgttgacctgttattagtcgacgacattcaattttttgccaataaggaagcaacccaagaagagttcttccatacatttaatgctttatatgaagatgataagcaaatcgtgcttacatccgatcgcttaccgaacgaaattccgcaactccaagatcgcctagtttctaggtttaagtggggattatccgttgatattaccccacctgatctcgagacgcggattgctattttgcgcaataaagccgatcttgaagggatcgaaatccctgacgatacgttaagttatatcgccggtcagatcgactcaaacgtgcgagaactcgaaggtgccttagcacgagtgcaggcatactcacgactgaataattcaccgattaccaccagtttagtggcggatgcattgaagagtttgcaccttagcagtaaactatcagaggtttcgattcccgtcattcaggaaaaagtcgccaagtacttccatgtaacaatggctgaccttaagggaaagaaacgcaataaacaaatcgtgattccacgtcaaattgccatgtatttatcacgcgaactgactgaaagttcacttccgcgcatcggtaacgagtttggtggtaaggaccatacgactgtgatccacgcccatgataaaatcactaaggcactcaaaactgatgctgaattacaaaaagccgtgggtgatttgacaggccagctcaaatcttagtgtggataaaaaaggataactcaaaaagttttccacaacttatacacatgtggaaaacttgataacgccgagtctttactcggttttccacagtacccactgctctactattactacgaacttttattattaatatatatctagtgcccgtcgctagaataaagaggggattaacttatgaaattcacgatcaatcgatctgccttcatcaaagaattaaataacgtccaacgggccatttcttcaaaaacgaccattccaattttgactggtcttaaacttgacgttaatactgacgctattaccttaactggtagtgatgctgatatttctattgaaaccaccattccagcaagtgatgacaacaatacgttagtcgttgaagatgccggttcaatcgttttacctgcccgtttctttagtgaaatcgtaaaaaaattaccagaagacaccatgactgttaacgtggtcgacggttttcaaacacaaattacttcaggggccgcttcctttacaatcaacggcttagaccctgaaaactacccacacttacctgaaattgatacgactaataccatcacgttagctggggatgtactcaaagagttgattggtcagaccgttattgccgtttccaatcaggaaagtcgaccaattctgaccggggttcattttatcttagctaacggtgagttcttagcggtcgcaaccgattcacaccgcctaagtcaacgccggatcaagttgccagaagccaataatgccaattatgatgtaatcattcctggtaaaagtttgacagaattatctcggatgatcggcgacaataatcctgacgtgcagatgcggttatcagaaaaccaagtcctatttgtgctggggaatacgtccttctattctcgcttactcgaaggaaattatcccgacacgtcacggctgattcctaaagaatctaatacgactgttgaaatttcagcacccgcactttcagcagcaattgaacgggcatccctgttatcccacgaaagtcgcaataatgtggttcgcttctccgttaacccaacggacaaaacgattacgattttcggtaactcaccagatgtcggggaagtaacggaacaactacagcccactgatttgtcaggtgacgaacttgaaatttcatttaacccagactacatgaaagaagcgttacgttcgtttgggcaagctatgatcaaaatctcattcacgatggcattgcgcccattcactttagtgccaactgaagaaggcgaaaactttattcagttgattacaccagttcgaacgttttaattagctgaataaatatacaattctaaataaaaggcccgcatttcaccgtgaaatgcgggccttttatgacggctaaaactagctaaagatggggcaatgaataggcaatagcgatgatgtaacttttgaagttttaacttatgcatattatattagctgctggtgaattgtcacgctaactatcgatgttgccctactaaaatcccaccatctgatgaaccccagtccttgcactcgttcgctacaaacgctcgctttcagataatgaatgctggctttagccaatttttataggtaaaaaacaagatattttattaaaatccgcaaaattagggaatttcagcaaatttacccctaggctagtatcccgatattaaaaagccctaaatcgtcttaaaatggctctgagtgcggttataaattgaactttcatcaaaaaacaagtataatataacctgttaggagtgtgtgtagcacgccagacagtcgtttaatagcttgtaatcagataggcaggtgacattgtgaaacagccaatagatattaaaaccccatatatgacgttggggcaactcttaaaagaaacggccatcattggatcgggtggtcaggcgaagtggttcttaaaagaaacaaccgtgttagttaatggtgaaccagatgatcggcggggtcggaaactttatccaggcgatacgattgaagttgaagacaacgggtcattttttattcgctcaaatcaagaaacgactgattagatgtacttagaaaacttagtcttgcatgattttcggaactacgcggatttgaccattaattttagtcagggcgttaatgttctattaggtgaaaatgcgcagggaaagacgaacctgttggaagccatttatgtgttggcgttaacgcgtagtcaccgcaccgctaacgataaggaattaattcggtggcaaaccaccacggcaacgttgcaaggccggttacataaaagtaccggtgctgtccccttggaacttgaattggggcggcggggcaagcgagcgaaagtcaatcatcttgagcaagccaaattatcccagtacgtcggaaatttgaacgtgatcgtgtttgcacctgaagatttatccatcgttaaaggggcacccgcggttcgccgtcggtttatggatatggaatttggtcagatgagccctaaatacctctataacctaagtcagtatcgcacgattttaaaacaacgtaatcaatacttacggcaattaaatcggcagcaggccaaggataaggtttatttgggtgtcttgtcggatcaattggctgcatttggtgcggaaatcatccataaacgactacaactgttgcagcaacttgagaaatgggcgcaagctgttcacagcgagattacgcaagaacaggaacaattaacgtttcactatgtcactcaagtgccaactgccgaccagacgtcggtcgatcacatttatcaaacgctacaggccttatatcagcaacaacaagccaaagaaatttttcaagggacgactttattaggtcctcatcgcgatgatttacaatttggtgttaacggcaaaaatgtgcagacttttggctcccaaggccaacagcgtacaactgctttgtccgttaagcttgctgaaattgatctgatgaaagctgagacgggcgagtacccggtcttattattagacgatgtcttatcagaattagacgctgcacggcagactcatctgctgacagcgatccaagataaagtgcagacctttttaaccacgccaagtcttgacggggtggcccgcaaattaattaatgcgccaaaagtatttgaagttagccatggcactttacatgaggaggaaccgcattgaccgaaaacgaaaaagaaaccaaacttgaacaggctcgcgaatatgatgctagtcaaattcaagttttggaaggtttagaagctgtccggaaacgtcccggaatgtatatcggtacgacgagtagccaaggactccaccacttagtttgggaaattgttgataacggaattgatgaagccctagcagggtttgcaaacgtgatccacgtgaccgttgaaaaggataatagtattacggttactgataacggtcgtgggattcctgttgatattcaagaaaaaacgggtaaaccagcgcttgaaacggtttatacgattttacatgccggtggtaaattcggtggtggcggttataaagtctctggtggtcttcacggggtcggggcttccgttgttaacgccttatcatcgaccctggacgtcaaagtaactcggaatggtcatgtttattacatggactttgaacgtggaaaggttaaaacaccgatgaagatcattggtgatgcgcctgatgatgctcatggtacggcggttcattttgttccggatcctgatattttccgggaaacgaccacctatgacattaatattttgacgactcggattcgcgaactcgctttcttaaataagggattacggatcacgattcgggataatcgccctgatgaacccactgaagatgactttctctacgaaggtgggattcgtcactatgttgaatatctagataagaataagaccgttctatttccagaaccgatttatgtggaaggggaacagaatgggattacggtagaagttgcgttgcaatatactgacgactaccacagtaatttgatgaccttcaccaacaatattcatacgtacgaaggtgggacgcatgaagaaggtttcaaacgtgctttgacgcgggtcatcaacgactatgctcgtaagaataacttgttgaaggaaagcgatgcgaacctatctggcgaagatgttcgtgaagggatgacggctgttgtcagcgtcaagcatccggatcctcaatttgaaggtcaaacgaagacgaaacttggtaattccgatgctcgggcagcagttgaccggttattctcagaacactttagcaagtacttgatggaaaacccaagtgttgcccgtaaagtggtcgacaaagggttacttgcatccaaggcccgggtcgctgctaagcgtgcgcgggaagttacgcgaaaaaagagtggcttggaaattagtaatttaccaggtaagttggcggacaatagtagtaaagaccctgaaattagtgagttgttcattgtcgaaggggattctgccggtgggtcggctaagcagggacgttcccggttgacgcaagcgattttaccgattcggggtaaaattttgaacgttgaaaaggccagcattgataagattttagccaatgaagaaatccggtcattgtttacggcaatgggaactggcttcggtggtgacttcgacttgagcaaagccaattatcacaaattaattatcatgactgatgccgatgtcgatggggcacatattcggaccttgttattgacgttgttttaccggtacatgcggccattagttgacgctggctttgtgtacatcgctcaaccaccgttgtaccaagtccggcaaggtaaatttgtgaagtatattgattcagatgaagaattgagtgaggtcatggggcaattggcaccatcaccgaaaccagttgttcaacggtacaaggggcttggtgaaatggacgcggaacaattatgggaaacgaccatggatccagacaagcggcgcctattacgggttcgtgatgaagacgctgcggatgccgatggggtcttctcgatgttgatgggggaccaagtcaaaccacggcgagaatttattgaagataatgccaagttcgtccaggatctggatgtttagtgtgtcagtttagtcattttgacctaagaactgaggcgcaagctgttaatcagacttagggtcgtaatggcacgacggttgtcttaatggcgacttttacttgagacatgtaaagcttaatcaagctttaatagcggcaaaacggatgaaggaggacgaatattttggctgattcagatttatcgaacaatcgtatttcggatgtgaacctttcgaagaccatgcgaacgtcattcttaagctatgccatgagtgttatcgtggcacgggcactgccggacgtacgtgatgggttaaagccagtgcaccggcggattctttacggtatgagtgaattaggtgtgacgccggataagccgtataagaagtcggcccggattgttggggatgttatggggaagtatcatccccatggtgactccgcaatttatgagtcaatggtgcggatggcccaagactttagctatcgctacatgttagtggatggtcacgggaacttcggttctgtcgatggtgacggggctgccgcgatgcggtataccgaagcccggatgagtaagattgcggttgaaatgctccgcgatattaacaaggataccgttgattggcaaccaaactatgatgatacagaacgggaaccagcagtcttaccagcacgtttcccgaacttactcgttaacggtgccactgggattgctgttgggatgacaacaaacattccgccacataacttagcggaagtcatttcagcaatccacctgttgatggataatcctgatgcaacagttgctgacttgatggaagtcttacctggaccagattttccaactggcgggatcgtaatgggaaagtccggtattcgtaaggcttaccagactggtcgtgggaacattattgttcgtgcgaaggtcgatattcaagaccaaaagaatggtaagcaacgaattatcgtgactgaattaccatatatggtcaataaagctaaattgatcgaacggattgctggtttagctcgagacaaggaaattgaaggtatcactgatatcaatgatgaaagtgaccgtgaagggatgcggatcgtcattgatgttcggcgggatgccagcgcctcggttatcttgaataacctttacaagatgacattgatgcagactaattttggctttaacatgttagccatcgttaagggtgctccaaaagtcttaagcttaaagcaaatcttaatctattacctggaacaccaagaagacgtgattcggcgtcggactgagtttgacttgaagaaagcccaagcacgggcccatattcttgaaggcttacggattgcccttgatcacattgatgaaatcattgcgattattcgtcaatcacaaacgagtgaaattgcgaagaaccaattgatggataattacggcttgtctgataagcaggcacaagccattcttgatatgcggttagtccggttaactggtttggaacgtgaaaagatcgagagtgaataccaggacttattgaaagccattgctgactacaaagaaatcttagctagcaaggatcgtatcaaccaaattatttacgaagaattaatggaaattcaacgtaagtttggtgataagcgtcggaccgaattgatggtcggtgaagtcctcagtattgaagatgaagacttgatcgaagaagaagaagtggctgttaccttaactcacaatggctacatcaaacggttaccaacgactgaatttaagtcgcaacaccgtggtggtcgtgggattcaagggatggacgtccatgatgatgactttattgaacatctactgacgacgtcgacccatgatgtcctactctttttcactaatgcgggtaaagtttaccggatgaaggcttacgagattcctgaatacggtcgtacggccaaaggaatcccggtcatcaatttactgggagtcaattctggtgaaaaaattcaggcggtcgttaatgtcacgggcgatgcgagcgcttctgataactacctgttctttacaaccgttaaaggggttgtcaaacggacaccagttcaagaatttgccaatatccgtagcaatggtttgaaggccattacgcttaaggatgatgatgaattaatcggggttacaatcacggatggtcaccaaaatgtaatcatcgggacgcacgacggttatgccgtcagtttcgacgaaaccacagtgcggtccatgggccggacggcttctggggttcgcgggattcgcttacgcgatgatgactttgtgattggctttgacgttttgaagcccgacagcaacgtcttcatcatcacggaaaagggttatgggaaacaaacgccagctgccgattacccaattaaggggcgtggtggcaaaggaatcaagaccgctaacgtgactgagaagaatggtcatttagctggtttgacgacggttgatggtcaagaagatatcatggtaatgacgaaccaaggagtcatgattcgcttcaatatcgcaaccgtttctcagactggtcgggcaaccttaggtgttcgtctcatgcggttaggcgatgatggtcaagtcgcaacgatggccaaggttgatccagagccagaagttgatgagactgtcgcaacggatgcaacgactgaggcaccagttgacgatcaaaccgtcaacgccgatgccactacgacagaaccaacaactgattcaaacgattcaaacgaataaattgataaaacaagcgtggtcgacaatcttgtcgaccacgcttgtttttttatgcgagtcaagaattattttggcaacgggtcgtgtgtgatttaccggtcatcggtcctattctggcctccaaagtcttgttttgaaccggtagaaacaatcttcctgcgaagaataatttgactgctggaggctcatcacttagtcttgccatcttccagtgattggcagaaatgccgataaattgggagaggacaacatgaagtaagcaattttagatttacgcggtcaaaactggcttgtgcgattgagaggattacagcagtgcgtgttattctgacgtcgacttggtttaaattaatgctgtgtgggtgtgggaaaatgtaagcgaaggggagaatttcagaaaaaagaaatatttcccgggaaataaaatgaaatatcgctcaattgacgtaattgattggtgtaacggattcaggatctttttgtaacagtcggccgcttcaacccttgcaacaaactgatttagatgctatactttaaattcgtgagtatctagcattagctagattactttccttgctcttcaaaaagaagggcctgaagtccataaggaggtgcaaatttcatgagtgaatcaaagaaatatgaaattacttacatcgtacgtcccgacatcgacgatgctgccaagacagctttagttgatcgtttcgacaaaatcttaactgataacggtgcgcaagtaattgattcaaaagactggtcaaagcgtcgtttcgcatacgaaatcggtggctttaacgaaggtacttaccatatcgttaacttaacagcaactgacgatgctgctttaaacgaattcgaccgtctttcaaagatcaatgatgacattttacgtcacatgatcgttaaacgcgaagactaatagacaaaattaattttaagagaggagcgcttctgcatgattaaccgtacaattcttgttggccgactgacaagagatccggaattacgttacacgaatggtggtgccgccgtcgcgacgttcactattgccgtaaaccgtcaattcacgaatcaaaatggggaacgtgaagcagatttcattagttgcgtcatttggcgtaaagctgctgaaaattttgcgaactttactcataaaggttcacttgttggtatcgatggccggattcaaacccggaactacgaaaaccaacaaggggtacgtgtttacgttacagaagttgtcgttgaaaacttctcattattagaatcacgggcagagtctgaacgtcatcagtctgccaatggtggtagtggtaataacaattacaacaatggtaattcgaattacaacaacaataataatgggtatagtaatcaaggccaaaatgcggctcctcaacaatcatcagcgaataacaataacccatttggtaatggtaatactggtaatgctagcagtgcggcaccatcaagcagtgctaacaacaataatcaggctgacccattcgctaataatggcgatcaaattgatatctcggatgatgatttaccattctagtctaattgcttagacagataacgaggagggaaatatcaatggcacaacaaagaagaggtggccgtcgtcgtcgtaaagtcgacttcatcgccgcaaaccatatcgaatacatcgattataaagatactgacttattacgtcgctttatttcagaacgtgggaagattttgccacgtcgtgtaacggggactagtgctaagaaccaacgttctttaactatcgccatcaagcgtgcacggatcatgggcttattagcctttgtatctgaagactaatttttagtcattcaaaaaccacagacttcggctctgtggtttttatttacccttaacttgactagatagggtggtggccgttcaatgaagcgtttacggtgattgacacgaaacgctgaagcggacggtggtttgtgataaaatatagtcattactgagaaggcttgagggatttttaatatgaaaaagatcttttcgcgtgaaaaaattccatttttcctacaaaatcggcagttacgactcttagcgttggttatttttagcttgtcgttaattatgctcgtcactggttatttaatgaactggatttttgggaccgttgtcctcatcttgattgtgatggctgtggtgatatcttataatacgttgattgagctcagttcgagtgcaaatgaatatatctcagacttgtcgtatcgtattaagcgcggcgaacaagaggcactgattcagatgcctatcggagtaatgatttttaattccgaccagaccatcgaatggatcaatccttatcttcagcgctatttcggtgataaggacgtcttaggataccgcttggaagatattgagccaacactggcagcgacgctgaacgctcatctggacgagcccgcgacgattcgttggcaagactaccagtttgatgtacgtgtccagcagagcactaatacggtctatatgatggatgtgaccaagtatgctgagctgacggatcaattcgaagatgaaaaactcgtgattggacaaatctttttggataattacgatgaaatcacccagtcgatgactgatacggatatttccaacctgaacaattacgtgaccaatgaattgtctaagtggacccagatgtttgggatgtacctgaagcgcttggatgatgatcacttcttcttgttgggctatgctagtagtttacgacgtgttgaagagaataagtttcgcattttagatcgaattcgggagtcgacttctaagcaaaatttcccactaacattgagtattgggattgcttatggtgaacggaacatgaacaatttggccgatttagcgcagagtaacatggaccttgccttggggcggggtggtgaccaagttgtggtgaagtctgaggacgaacctgctcgtttctacggtggtaaaaccaacccgatggaaaaacggacgcgggtacgggcccggatgatcagtcagacgttacaagagttaatgaatcaatctgaccagatctttgttcaggggcaccgccaaccagatatggatgccgttggggcctgtctcgggattcgccgaattgctgaaatgaatggtaaacagtgttggatcgtcttggatgagcaaaatgtgcattcagacattcagcgtttactggaccagttgaagtctgatgagaacatcgagtcagcgattatctcgccggaagaagcacttgagaaggccactgaccaaagtttattgattatggctgaccattctaagccaagtatttcaatgtcacaggccctttatgagcggctcgaaaatcgcgttatgattattgatcaccatcgacggggcgaagaatttccagaaaacccagttttggtttatattgaaccgtatgcttcgtcgacttgtgagctgattaccgagatgtttgaatatcaatcgcacgatgccgaaccaatcaataagattgaggcaaccgcaatgttgaccggaatcgttatcgatacgaagtcgttttcattacgatcaggatcgcggacgtttgatgctgctagttatctacgatcagccggtgcggactcgttactcgttcaacaatttatgaaggagaacgttgatagttatctacaacgcaatcatctgattgaaaccgttgaatttgttaaccaggatatggcattatgtgttggtgaagatgatcaggtctatgacccagtaacggcggctcaagctgctgattcactattatctatgtctggtgtcgacgcatcattcgtgattacacgtcgtgaagatggacgggtcggaatttcggcacgatcacttggcgagatcaacgtacaagtttatatggaaaaattgggtggtggcggtcatttatcgaatgctgcaacccagattgaagggcagtcagttgaagccgtcaaacaatcgttgattgatttgttaacggcaactgatgagccgaccacagaatctaattaggagtgagtctaaatgcaagttatttttttgaatgatgtccgtggtaagggcaagcggggccaaatcaagaatgtcccggatggttacgcgcagaactttttaattaaaaagggattggccaaggaagccactaaagcggcaatcaatacgttgaaggctgaacagaagtctgaagcagcacgtgccgctgaggaattagccgaagctaagcaagtcaagacagttttggaagctgatgaaacggttgttgaattgaaggccaaagctggtactgatggtcggttgtttgggtcaattcctagcaaacaaattgcaacggcgttagctgaccaataccaagttaagcttgataaacgcaagatcgaattaccagaaccaattcgggtattaggttacacaaacgtgcccgttaagttacatccagaagtaacggcgaaaattcgcgtgcacgttgtcgaaaagtaaaaggacggatcacaaatgaacaacgatgtgctggatcaaaccccaccacaaaatattgaagctgaaaaggcagtcttgggggctattttcttaaacagtgacgccctcgtggaagcgatggagtttgtcgaagcgcaagatttctatcggcgcgcacatcagatcatttttgccagcatggtgactttaaatgaccgtgacgaggctattgatgcggtgaccgttagtgatttattaacggcccaaaatcaattggatgatgttggtgggatgagctacattgctgaattagctgggtccgtaccgactgcggctaacgctggctactatgctaagattgtggcgcaaaaggcgacggtgcggcggttgatcaagacggccacggagattacgcaaaaggcctatacggaaaatgatgacgtgaccacgttattagatgacgcggaacgcgacattatgaacgtgtctgaacagcgtaatcagagtgggtttaagtcgatttcagatgtgttgaacgcgtcgattgaagaaattgaccgcttgtatcaaaatgatgatgacattaccggtttaccgactggttttgcggagctggataaaatgaccgccggcttacaaccggataatctgattattttggctgcccggccagccgttggtaagacagcctttgtcctgaatattgcccaaaatgtggcgactaaaacggatacgacagtggccattttcagtttggaaatgggtgccgaatccttagtcaaccggatgctgtgtgcagaaggtagtattgacgctgggcatttacggacggggcaactgaacgaagaagagtgggaacacttggtggttgccatggggagtttgtctaaagctagtatttttattgacgatacccccggaatcaagatgtcagaaatccgggccaaaagtcgccgcttagcgaaagagcaaggtaacctcggcttgattgtggtcgattatttgcaactgatcgaaggtagtaacacagaaagtcggcaacaggaagtttccgaaatttcgcggcaaatgaagaaactggctaaggaactaggtgttccagtcattgccttatcacagctatctcgtggtgttgaacagcgtcaagataagcggccagtgctttccgatattcgtgaatcgggttcaattgaacaagatgctgacatcgttgccttcctataccgggaagattattatgatcgcgaaggcggcgacgatgatgatggcggtaattttggtggcggtggtgactttaatggcggcgatccgcgggacgaagatgcttctgaggatgttggtgaagttgaagtgattatcgaaaagaaccgtgctggggcgcggggaacggtcaaactattatttgtgaaaccatttaataagttctcctcagtatcttatgcgcaggatccccaagcttaattgcagtcgatcaataaatttgttatcaaattcctcttaaactaattaagaggaattttttgtttatcacgtgccgaggctacttgttttccgccaattggttgggctgatgcaccaatttggccgtgataataatgagttagtgagataaatgtccctgttattttaaataaactttgctatgatgaaaagtagacagatttaataatggtggtgatggcgtggcacaaaagcaactcattaaaacgccgtggctaattgccgggcagtttatgaataacattggtatgagtttcatttggccgttaacgacgatctacatgcacaatgtgttaggtaagtcgttgacggagactggaattgtcctgatgctcaattcagttgccaacgttttggcaagtacgattggtgggcgtatatttgatcgaggtaatccttatcacctgttactgatgggaatcacgttgaatggcctcgcgaactttgctctgatcttttttcatggatggccgtggtatccgatgttgttagtcgtgaccgggtttgctagtggctggctaaatacgatgtttaatgctttggctgccagtgtcccccgcgataaagtgcggcgaacgtttacgttgatgtatctcgctgccaatctcggagttgtcttcggcacgatgctggttggtatcgtgtatagcatggggatggccttgctattctcgatgaccacgagcctcttcgtgattttcttgattattgcattatttgaatacaatgtggattcgtcgaacgtgaccggggttgatccgcgccaaggacaagatgtgcacttgccacgggccaattttcacattgtctggaccttctttattagtttatttattatctggttgctatacgaacagtgggtcagcaatttatccgtctacatgacgaatttggggatgccgctgcggaattacagttttctatggacaatcaacgcgggcttactggtccttattcagagtattttaagtttgctggggaatcggattaaaaatttatataatcaatttttcttcggcatgctattcgtgggcttatcatttctatcacttgtgattgcgcatgattacccacactttatctttgccatgattttattgacgattggtgaagcaacttggtcaccagccatgccaacactagtgagtcagttatcaccagttagtgctaaggggcgttaccaaggactagtacaagccttttgtgcgttagggcgctcgctagggccgttatttggtggtgtgattatcgataattggtcttataaggtgctgtttttgttggcatttgtggttttattgatcgtgttggcagttaatatcggtgtcgttcactttaatttacgcaaggccgttaattatatgaagacggacgttcagaccgatgtttcacgtgaaacaaaataattagagaagttggtggcagtagtgaaagtgatacgaaaactaaaggctaaacgagtcgtgattaaagtcgggacaagcacgctagtttatccagatggatcgatcaacttacgggcaatcgatcaattagcctttgtcattagcgcaatgcgacaccgtgggcgtgaagttgtcttggtttcgtcaggggctattggtgttggcttgaattatatgggactcaagcaacgtccaaaagcaattcctgaacaacaggcgattgcggcgattgggcaaactgaattgatttcgatttacaaagaacgtttcgccatttatgaacaaaaaattggccagttgttattaacacgtgatatctttgtttatcctaagagtcaccataatgtgttgaatacatttgaggcgctattaaaacaaaacgtggtcccaattgttaatgaaaatgatacggtcgcggtcgatgaattggatcatgaaacaaagttcggtgataacgatcaactatccgcaatcgtggccacgaatatcggggcggatttgttaatcatgctatccgacatcgatggcttttatgatggtaatcccaatgcggatgcccgagcccagttattagggcacattgagaaggttgatcaacatacttataagctagctggcggtagtggcagtcggtttggtactggtgggatggtcactaagctaaaagcggcagaacggatgatcgatgcgaatggtcaaatgattttagccaatggtgcggatcccacaattatttttcaaattttagcaggcgaaccagtcggaacgctattcggttaagttggggaggttatcaaaatggtagatttagaacagttgggtcagcaggctcaacaagctagctatacgctggggttactttcaacggcgcaaaaaaatcaagtgttgaccgcaatggcaacggcgttaacgagccatcaagatgagatattggcagctaatgcgcaggatttagagaacccgcaagtaccagttaagtttgttgaccggctccggctaacagcagaccgcatccaggatatggcgatcgggctcaaacaggtcgtgagtttgccagatccaattggaaatgtggaccgcgcgtggcgcaacgaggccgggttgatgattgccaaggaacgggtaccattaggtgttatcggcatgatttttgaagcgcgccccaatgtgacggtggatgcatcagcactgtgttttaaaaccggaaacgctgtaatcttacgcggtggtaaggaagcccttcactctaatcaagcacttgtccaagtcttacgtggtgcattacgggccgaagcggtcgatgagaatgcgattcaactgattacggatacgtcgcatgcgactgcggctaagttcatgcagctcactgattacgtggacgtcttaattccacgcgggagcgcccgtttgattcaaacggtgttggctaaagcaacggtacccgttattgaaacgggagccggtaattgtcacgtatacgtggacaaagacgcgcaattgcaaatggcaaccgatatcgtgatcaatgggaaagttcagcggccatcagtttgcaacgccactgaaaagcttctaattcatcgtgaggttgcggccgattatttacctagcatgattcaggcacttcgtgaacaaggcgtagaagtacgcggggatgccgcaactcaagccattgttcctgatgtggttccagcaacggatgcggactggggaacggaatataatgatttaattattgcagtgaaagttgttgattcagaagcagcggccattacgcacatcaatcgttacaatacccaacattccgaagctattgtgacggataattatcaagctgggaagctcttccagcaacgggtcaacgcagcgtgtgtttatatcaatgcttccacccggtttacggatggctttgaatttgggtttggcgctgaaatcgggatctcaacgcagaagttacatgctcgcggtccgatgggattagcggaattaacatcttataaatacgtcattgatggcaatggtcagattcgccattgatgagcaagtatcgttattagtcagtatatcggctaatagcgatttttttattgccgattggggggacaagtgtttatccgatttttgacttcttgatttgataacccaccatagccggtctagttttaagctcgcgtaccatacgtttggttcaaaagcgcaagctagtttcggcctgaatagtgaaggcataataccatggtgacttagaatgctgagcgaaacttttagttgacagatgtaaacttaaaagctaatcttatcttaattagtttttaatctaaggggaggaatcatgatgatgaacgcaggattgcaaaacgttattgtagtcgtgaaaaccagtaattaccggtttaccacggataacggaggcttaccgttgatgtgttgttgtcggcgccaatcgaagtatcgttgccagtaaccgacatcatcgttaagttaggagtcatcattcatgaaaaaaagaatatggatcagcagtattgctattgtagccctaggattagtgttaactggctgcggtagccagcagagtagtcagcagaagacgttgaacgtaacggcgacccagtcgattgcgaccgctgatcctaataaggccgacgatatcgctagtcaggccgctattgctcagtttatggaaggcttgtacacaactaatcaaaaggggaaagtcgtgccggcaattgccaagaaagtcgtcaaaccgactaataatgggaagacttatacctttaatttgcggcacaatgccaagtggtcgaatggaaaaaaggtcacggccgctgactttgtttattccgtgcaacgccaggtcgatccgaataccaagtcacaggaagtcggacacgttgctgaaatcaagaatgcaacggcaatcacggctggtaagaaggcggtgaagaccttaggcgttaaagcgttgggtaagtataagttacaaattacattgcaacagcgcgtgccgtattttaattatcggctagccacagagatctatccgttaaacaaacaatttactgagaaatacgggaataagtatgggacatcggcacagcgaacgctctctaatggtccctatgtcttgaagagttggaatgggacgaatgacacgtggaaatatgtgaaaaacccgtattattatgaccgtaaacaggtccgaatcaagaatattaaggtgcagacggtcaaaaataacagtacggccgagaacctcttccaaagcaatgaggtccaagtcacccagattacgggcacccaagtatcggcagctgagcaagggtcactaaaaagtcagatgaaggttacgaagttaaatcaactctacttcatgttgtggaaccagaagcgctcagcattgcagaatactgacttgcggcgtgctgtgagttacgctttgaatcgccagtcattggttaagaacgttctcaaagacggctcagtagcggcgacgtcattagttcctgctggcaataccaagaacccgacaacagggaaagattttaatacggataccggaaatttgtatccatacagtccagcaaaggctaaacagtattggcagaaggctcaggcgagcttaggaaagcaaaagttaacactgcaattattgacgaacgataatgatattaataagtcggtggcagaatatattcaagctgcaattgagaaaaatcttagtggtgtcacggtcaatgtcaagtcagtaccactgacaaatgagatttcaactttaagcaagggtgattttgactttgccacgttgtcgtggtcgagtgatttccaagatccagttgatttcttgaataaggcttcgataactaattctgtcaactttgggaagtttaacaatgcgaaatatgagcaattaatctcaacgattacggccgataagcagtcaactaaggcccgatatcagacgatgcagcaagcggctaagctagtcgctcagcaacagggggtcacaccgatttatcaaactgctgctgctcacttgatcagtaacaaggttggtggggttcacttcacattgttgcgagacgccctttatcgctatgcctactggaagtaatcagtcagataaatattattaatttgatagaaatgtaattgaataaatcaactagcccgaaaaaacgcgttttttcgggctttttttgatgttttggcaaacggcgcaataaaacggataaccacgggcttaactgtgaatagttgtcctgaatcagtttgcagtgttctgggtgaccagtcataataatcgttatcttttaggggtttgtgccctgtttgaccactaagtaaggcgaccttatcaaggataggcaaacaccctgtcaccttcttataataagattaattttataaactgctcagttaatcacatagggggtgtgatgctttggttaaacaaactacggaaatgaatgatgcaagttacttatttaataccggcgcaggatttaatagtcaggattacttaggctgtcatttggccgcatctggtcgggcggtatttcgcgtctgggcgccgcatgctaaggcggtcggggttgttggcgattttaatgactggcaaccaagcgcactaaagttattaggggcgactgggatttggcaaggacaagttccgaacgttcatgcgggtcagttatacaagtttcagatcacaacaccaactggccaagtgcaactaaagattgacccgtttgcacaacagttcgaacgaaaaccgggggatgcggccgtagttgttgagccgatgacgatgcgttggcacgatagtttgtggctagctcgccggaagaagtcgcgcgctgccaatcggccaattaacatttatgaggtgcacttaggttcgtggcgccgtcatcttgatggtagctactacacttatgcggaattagccgctgaactgattccctatgtaaaacaacggggctatacccacattgaattaatgcccgtgatggaacatttattagatgcgtcttggggttatcagcaattagggtattttgcgccaaccagtcgttttggcaagcgtgacagttttctcagctttgttgaccagtgtcaccaagcgaatatcggggtattcgttgattgggtaccgggtcactttattcgcaattatgatgcgttgtaccagtatgatggtacgccgacatttgaatacgctgatcctgagcgcgcgaataaccgtcgttggggggcgtggaattttgatctcggtaaaacacaggttcagagttttctgatttcaagcgccgaatattggctcgaccagtgtcatctagatggcttgcgagtggatgctgtctctaacatgttgtattgcggctatgatgaagggcgcgaagggcaggttaatcagtatggggataatcgtaatttagaaggcatcgcctttttacaaaagttgaacaccacggtcttaacccaccatcccgatatcttgatgattgcggaagagtcgtccgcctatccgcaggttacgggttcggtggccaatggcggattgggatttaactataagtggaacatggggtggatgcacgataccctggatttcttcatgatggatccgttatatcggcacgaccactttaatctactgacatttgcattcgtgtacatgttcgatgaacggtttattctaccgttttcacatgatgaagtcgtgcacggcaagaaatcattaatgcataaaatgccgggggaccgctataatcagtttgcaaatttgcggacgatgctaacttatatggctgccttcccaggaaaacaactgaattttatgggctcagagtgggggcagttcctagagtggcgggactggagtgcgttggaatgggtcgacttaaaggatgatctcaaccatcggatgcaacagttcacaacgcaactgaacgcggtctatcggcacaatcggccgttgtgggaacaggaccatgatcctgcggggattatttatacacataccgatgatcctgacagttcgaccatggggtttatccggcaggccaaacggaaatacagttttgtggtcgctgctttcaattttgttcctgttgaacgtcaagattaccggatcggcgtaccgtatcgtggccgttatgagttgttactcaacactgaagcgcaggcttttggcggcacgtggacaaagctagaaacaacgtttacggcggtcgataagccgtatcgggggcaaccagctagttttaccgtgaccttgccggcgatgggtgcattgttgattcgaccagttaaagtgatagggggagttaagcatgcaagatgaaatgttagggattattttagcgggcggtcagggcacccggcttggtaagttgacgaaggatacggctaagcccgccgtgccattcggcggtcgttaccgaattattgattttacactcagcaactgtgctaactcgggtgtgaataccgttggggttatcacgcaatatcaacccctagaactgaatgcacatattggtagcggtgcgagctggggctttgatagcttaaatggtggggtgacggttttacaaccatactcgtctagtgaaggtgagaagttctttcaagggacggcgcacgccatttatcaaaatattgaatatattgatcaacaagaccccaagtacctgctcgtcttatctggcgatcatatttataagatggattatgacgctatgctgaaatatcatcaggagaagaaggcttcgttgaccgttggggtgatccacgtgactaacgaagaagccaaacgctttggcatgatgaatacggatgcgacggatcgaatcattgagtttgaggaaaaaccggaacatcctaagagtgataaagcctcgatgggcatttatatcttcaactggccgactttgcgggattacttagttaagagttatgctaccgataagtcacttgaagactttggtaaaaatgtcattccatcatacctagccaataatgaatccgtttacgcttatgcttttaagggttactggcgagatgttggaacgattaagagcctgtggcaagccaatatggaattcctatcgccccataatcggttaaatatcggcgatcgttactggcggatttactctaaagcagaggtgctaccaccgatgtttttgacggaaacgagccaagtcaataatgctatggtcgttgatagttgttacgttgcgggcgaaattgatcattcaatcttatcgcaacgcgtgtcagttgggatgggtagtcgcgtggtcgacagtatgattatgcccggtgcaacgattggaaaaaatgtggtgattgaccacgcattgattggcgaagatgcagtgattggtgatgatgcccagattattggtacgactgataagattgcagttgttgggtatcacgaaacgatgggggtggaacaaccatgagacgtgaacaagtgagtgccattattaatttactggaaccaagtgacgcgttacaaccattgaccgcagttcggccagttggaatgttaccctttggtggtcgttaccggttggttgattttcaattatcgagtgtcatcaatgcggggattcaaaatgtgatggtgacggtcccgcggtcagggcgttccgtggctgaccatttgcgtagcgggcgtgactggagcctgaatacaattcgcggcggcctattcttgtccccatacaatgacttgaaattagtggcgccagaaaagaaggccgcattactgcaccattactatgataattcgattcagtttctgaaatgcagccagagtgagtactcggtagtgatgagtactcgcaatgtcggtaatattgatttaaaggcgctactacggtatcacgaggaacgtaacagtcccgtgacggcggtttataagcgcgttgatccagctagtttgattcccgaaaatacaatcttacaattgactgctaagggagaagcaacggcggtcgttccgatgagcaaggccaagattagcccgaagacgaaacaagttgccaagagcatggctatttacttgatgagtacggtcgatttaatcgaattattgcagtcggccaatcaacggggtgacatgatcagcctagaggaattgatgcggcaagcagtcatccaacataacgctaatgcttttgaatatacgggctttcaggcgaatattcatgatatcaacagctactttgcggccaatatggccgttttggatgaagctaatttccgagcgttattctacagttcgcgccgtatttacaccaaggtcaaaaatgaaatcccaacgttctttgcgactggttcacagtgccgtgacagtttatgtggtactgggggctatattgaagggcaacttgaccactccgtcatctttcgggatgtactgattaatcgtgatagccaagttaaaaatgccatcattatgcagggggcccggatcggtgccggttgtaagttagaaaacgtcattatcgataaagacgccgtaatcgggcccaacctagtgcttaaaggaacttcaacgacaccgttagtcatcagcaaagggcagcacgtctttcaacaagcggaggtggctgtgcatgactagggtattattcgcggcggcagaagcggcccctttttataagactggtggcttaggcgatgttagtatggcgttaccgcgcgccttgcaagcggaaggaattgagacgcgtgtcgtgattccgtattaccctcaccagatgccgaccgaatatcagcagcagttagtgccagtgacgcattttactgttcaagtgggtgaacatgcgatgtattgcggtattaaaactctgacagtcgcgcacgttcagtattatctaattgataatttagattattttggccgtgaaggattatatggttattgggatgatggtgaacgctttgccttctttcagatggcggtttgtgaaatgatggagcggatcgattatatccctgatattttacaactcaatgattggcatacggcgtttattcctgtcttgctagcggaaaagtactattggatcgaagcgtatcgtgatattaaaacggtgctgacgattcataacttacagtttcaaggtgtctacgatccgattattttggatagtctctttcgaatcggaactgagacttacaccgaagccggcgtggcgttttacgatcaagtgaactggctgaagggcggtattaactttgcagatgccgttaatacggtgtcaccgacctacgcacaagagattcaaacaccagcttttggggaacgtctcgacggggtgctgcgggccaatcggtacaaactgagtgggattcttaatggcattgatatgcaattatacgatcccgcaaccgacctggcactaacggcgaattattcggctaaggatttgaaacctaagcgtcagaataaacgtgccttacagcgccgattagggttgcctgtcaaaaacgtgccggtattggcagtcgtttctcggttaacgaagcaaaagggtatcgacctcttgctggatgcattgaatccattcttgcagcaacaagatgtgcaactcattgttttgggaacgggtgacccagcattggaacgcgcgttacgcacctatcagtcggcgtatccgcaaaaggtggtcgccgcgattcaatttgatacgcagctagctcagcaaatctatgcggccagtgatatctttcttatgccttctgcctttgaaccgtgtggcttgtcgcagatgatggcgatgcattacgggacgttaccgatcgtgcacgcggtcggtgggttgcgggacacggtcattccgtacaatcgctataccggtcaggaaaccggctttagttttgacgactaccagccagcggttctacgtaaaattatgattctagccgtgaccttatatcggcagcatccactggtttggcggcagctgcaacaccaagcaatgacttgtgattttggctgggaacattctgcacagcagtaccgtgcgacttatcagaagctaatgcgttaggtttgatgggggtgtgaatttgaaattaacgtgtgcgcaatttaaaaaggactttctaagtgaaattgagaccttgtattcaacatcgctgagtgacacctcgacgattgggcaatttattgcactgggacagctagttcggcgctataacagtcagagttggacacgaacagctaaattttaccgcgatcatcatcagaaacaagtctattatttttccatcgagttcttgccgggacgcttactcgcttctaatttgttgaatctcaacttattgacgactgtaaaaaaagggctaacggaattgggcttagactttgagacaatcagtcaggctgaacctgatccggcgcttggtaacggaggattaggtcggttggcagcctgctatatggacgcgatggctagtttgaaaattgctggcaacggtaacggcatccgctatcgttacggcttgttcaaacaagttttcatggatggctatcaagtagaattacccgatgattggctccatcatggcaacgtgtgggagacccggcgcgataacaagagctgcattgtccagttcggcggcaatgtgtggttacaaccgcaagcggatggtagtttacaaccgcaatctgaaaatacggaagacgtgctagcggttccttacgacgttggtatcgtcgggtatcacaacgatattacgaacaccttgcgtttgtggtccgcggagttaccacccagtgcgacctattcttcgcaggatcagcgtgatcgaatcagtgagattaccaaggtcttgtatcctgacgattctaactcggccgggcaacaactgcgtttacgccaagaatactttttctcttctgcgggtgttcaaagtatcgtgcgtgatttttgtgcgacgcaccatggcatcaaattgttaggcaaaaaggtcgcgattcacattaacgatacgcacccgacgctggtgatccctgagatgatgcggctattaatggatgaacatcactgttcatgggaagttgcgtggacgttaacgacgcaagtcatgagttacacgaaccatacgattttacaagaggccctcgagacttggccaatcgatatgtttaaaaacctgctaccccggatctatcagattattgcggaaatcgaccggcgctaccgggaacaacaaacgccgatttttggcaaagcgctcgttgatcagacggcgcctttaggcaacggacaagtacggatggcctacctagctgtgattgggagtcacagtgtgaacggtgtcgcgccactgcatacggaattactgaaaacggatgtgttacggggcctgtatcaagtttatccggagcggtttaataataagacgaatggcattgcaacccggcggtgggttcaattggcgaaccaaccactagcgcaattgattgatcagacgattggttcggactggcggcggcaaccagatttattacagacgctactgccgtatcaacaagatgaccactttttgtaccagttaggtcaagttaaactgactaacaagcaagctttagccgcgtacgttcagcgtactatggggatcaagattcgcaccgacgcgatttacgatgttcaaatcaaacggttgcatgcttataagcggcaactcctacacgtctttgaaatcttgcgcgagtattttgccattaaggatcatccgcaacagccagtcgtgccgcgagtacacattttcggtgccaaggcggctcctagttatcactatgccaaggcgattatcaaactcattaatgtcgtcgctgacatggtgaatcaggacccggcgattggtgatcggttaaagatcgtctttattccgaactacggggtctccattgccgaactgatcattcccgccgccgacgttagcgagcagatttcaacggcctccaaagaagcgtcggggactagtaacatgaaactgatggccaacggtgcattatcattggcaacgtatgacggcgcgaatatcgacattatgcaagcggcgggtgctgaaaatgaatatccgtttgggcttaaggtcaatgaagtgtacgactattaccatcgcggcaactatcacgccgctgacttttacgatgctgatcctgaattaaaacggctcttagatagtttgattgatggcacgattccgggaattccaacggttggtcgggaaatctatgattcattactgcggtataatgatgaattctttgtcttagccgattaccgggcttatgtcacccaacaacagcagatcagtcgtgattttcaaaatcaacccacttggcaacaacgctcgttagccaatattgccgcttcgggacactttgccgcggacttagcagtggcgcggtatgctgacgatatttggcaagtgccccacgaacgactgaattaagaaaggaagggtgacggatgcaggtaacgtataactcatttttacccacgtataagacgccctttggtgccgtgacccgccagacacccgttcaattcacaatcagtgttcagacagtaacgccggttaagcagattgatttatgcgtggctcatgatggtcagtgggatgatgaacaggccttaccgttacatccaatcagtcccacaatgtatacggccacgtttataccgacccaggttggcctgtacttctactattttcggattgaaacgacgaccatgaccgcttattatggttgcgttgatggtggttatggtggcccgggcgttcaatacgtcttgcgcgagcatgttcaaatgtatcaattgacaatcttgaaagcagtagaaacattgccacaatggtatcgtgaaggggttgcttatcagatctttgttgaccgcttcaataatggcaacgcggatggccacgttaatgcgcccaagccaaatagctttatttatggtcaactaacggatcgcccactatacgtgcgtgatgaacaccgggcgattttacgctgggatttttacggtggtaatttgcgcggtattagtgctaagattccatatttacagcgactcggtgtgacaattatttatctgacgccgatctttgaggccagcagtaatcatcggtatgatacgggtgactatctgaagattgatccggtcgtcggcgatttgacggactttgataacctggtcgcggccgtacaccgggccggtatgcgactgatcttagacggtgtttttaaccatgttggtgtggattctaagtatttcaatcaggcgggccattacccgacggttggggcaactcagtcgaccacgagtccgtactacccgtggttcacattcattcattatccccacgattacgatagctggtggggcatccgtgatctgccgacagttgataaagacgatccaacataccgcgattttatctttggtaaacccgattcggtcattgattattggacgcaacgcggtgtggatggctggcgcctagatgtcgcggatgagttgccagacgatttcattgctggaattcgacggacccttgaccgttatccggataaggttttgatcggtgaagtttgggaggatgcctctcataaattagcgtatgggatgcgccggcactacttagagggcggcggcttacaggctgtcatgaattatccgctccgccgcttgattattcacgttttaaacggcacgctaacaccagccgaatggtggcgtgaactaatgaccctcaaggaaaattatcccgctacgacgtttcgctttaacttcaataacatcggtagccatgatacgcccagaatcctgactatgttagccgaagatcgccaacgcctacgtttggccgtccaactactcttgacgcttccaggtgtaccgtgcctgtattacggtgatgaggcgttgatgatgggggggaaagaccctgataaccgtgcgttttatccgtggcaggacgcagatcaggcgcaagttcagtttgtcgctgactgggcgaattggcgtcaacggcacccgtggttaaacacagcccactttgtgccgttttacttggcagattatggcattggctacctttattggcaggctgatcagaccgtgatggtgattgtcaatgtgactactgagccgcgaaccatgacgagtcacgatttaaagttgagtggtgtgcccataaaattagcacaagcgattcaacgctgccttgtgacgcagacgctgggtggtgaacagttgcgccttattgaaaactttacctaaattttacaggaacttgatgattgttagtacggttcagccgtatagtataattgtactttttaatagcaccccgctattgattatgtattacgaagtactcatcgatccttaatgagacgtaggcacattagtgcgtggctttccttgattggccacgcatttttgtgcgcttataagcagaatgtctgcgttgttcagacgaggtgcttataataaaggtaaacactaaagcaccttttcggatggttttaaatagacgtcatcacgaaggtaattagtgtattggtggcgctggttattggccagtgactgattaattagggggtaattggttgtaccaagcagtagtgttttttgatttggatggaacgttaatgcaggacgataagacggttgcggccagcagtgtgcgggcaatccagcaattacgagctaaccacgtcctacccgtcattgccacgggtcgcaatgtattcgaagttcaagatgtgatgacaacgacggggatcgattcaatcgtcagtgcgaatgggagttacgtcgcgtatcaagggcagtttttgagtgcgcacgaactggataaggagcttttgaccgatattactcattttgccaatcgccaacagaatgcgctagcttattataataacgccggttttgcgttaagccatcgtgatgcattgacaaccagtaattatcgggcactcagacagacggcccgggtcgcaccgcacttttatgaacatcaacatattaatttcttactgacgtttgatccgttgaatgcggcgcaatatcggcagcgatatcgaggccgactacattttgttcgtaataatccgcgtgcgctggacactatgcaatggggtgtctccaaggcggttggaattcaggatatcttaaccaaggcgcatttaactaaggtaccgacctatgcgtttggtgatcaattaaatgatattgagatgttccgaatgatccagacaccgattggggcaatgggcaatggtcatccgcaggtcaaacaactcgcgcggtacgtgaccgctgacaacatgcacggcgggattgcccaaggattgcaacattttgatttgatttgagaattgacagctagtctgataattataagcttccagtgagcagtccaactggtgagattagcgactggcttaaacaaaacaaaccggatttggtaaccatgacgtggtcgccaaatccggtttgttttgtgatgagtttaatggaaatacgttagtttagttgtgccttaatattggcgagtgtgagctgagtcgtatcggtaaaattgatatctgccgccgctaaaacggtcgggtcaccaataccgatggcagtttcgccagcgcctttgatcgattgtacgccagccgccgcgtcctcgacaccaatacagtcagctggattaaggcctaaaatctcagcaccgcgccgaaaaatctcgggatcaggtttaccgtgtttgagactagcggggtcgacggccttcgtaaagtagtcactaagaccgagtttacgtagcacaagcggagcattttttgatgctgaagcgagtgacaatgcgtagccagccgttgttaattcagtcaaaaaggcggtgatgcctggtagaatgttggctggggtcatttggttaacgagctgcaaataattggtgttcttttccgtagctagcgcttgtttttgggccggtgtgaagtcattttctcggtgcccttgagctagaatgaggttgagtgaatccatccgactgatacctttgagcgcgtcagctaattgatcattccaactgaccccgactttatcggcgatctggtgccaagcttggctatgaaaagtagatgtgtccgtgataacgccatcgaggtcaaagacaaaccccttgattgctgcaaatttaaccatgttgaatgcctcctagattaatcggtataagtgacggaaagtggtttcttagcttgtaattggtaatgctgttttccaatcataatcgtgctgggttggtccgcagtgacggttacccgttgatgatcgataacgaaaacatagtgaacgccccgaaagagatgcttgaatttcaatgtttgccagtgttcaggtagccgtgggttcacctgtaagtgggcacctagtggattgaccccgccaaagttccgtgtcgtcaggtttaaggtcgcacacatgacgccgaggtgaatcccttcagcggtcgtcccaccttgaatgtcgtaatagtcggatgcgagggcctctgagaaaagcttccaggcgtcatcgtcattatcgtcaagctgattcaaaacggcgtaaacgatccgcgagagagtggaaccatgcgttgtgcgcgctaaatagtattgaatgttatgggtcagatactctttaggaagttgatatcccattttttcaataatcttctgaacagttgtgacatcgaagttataaaaggccatcaaggcgtctgcttgtttggccacttggtaagcatcgggtgtcttagactctgctttcaagatccggtccatccgggcgatgtcaccgtacttttgccggtaagcttgaaagtcaagcgtcggtaggttgaagtacccctcaaattgagcaatgattccccgacggttgatttcaagtgttaattgatgactgatcgtcgttaacgcttgctcagccgttgagtcaaattgtgcggcctgagctgccgcttgaaaagcagcttggggcatctgcgcccgaagcgtggtaatcgtgtcaaagagccacgcaaccatgatattggtataggcgttattcttcaatccagcggtcgtgctgtttggatagttttcatggaattcatctggtcccatgaccccactaatgttataacggccattagcttggtcataatctgctttactgatccaaaaggctgcgatcgatagcaacatttccataccgtaatgagttaagaaatcacggtcctgagtaacgtggtagtaaaaccagacgttgtaggcaatatctaacgagacgtgtcgctggagccggctattatctggatcccaggttttagtaatgggatttaagtgagtgaattgagattgttcatcacccttggatgctgattgccaggggtacatggctcccgcgtagccttctgcttcggcatttttacgcgccattggtagtcgccggtaacgataagctaagagttgtttggctagttccggtcggtgcaacgtgtagaatggtaaaatgaacatttcgtcccaaaagacgtgtccccggtaagcttctccgtggagcccccgagcaccaacggaagcgtctaattggccgctttcaattgcggcagcagaaacgaaactgtggtaaatattgacgcgcagtaagcgttggcttgtaatatcgccacggatcttaatatctgtggctcgccaagtcgcttcccaatagtccttgctagtggttaccgtattgtcaaaactggactggtcgagctcggcttggacgtgggtcaactggggatcactatggtcattactagttgcaatgacgacgttcttatcgaaggtatacgttttaccagcttctaccgccagtgaaacggtttgctgaacgccctgaggttgttgcgtgctattaaagttctcaattgcaggaacgtctgggctagttagtttggccccaatcgtgtaattgatatgtgatgatttggtctgaccagaaaggtagacggtattagcagccgtttcgatgcccatagtcttcagatgatgctgatcgaagacgttatagcggctaacgttgctattcacgacgctaccgtcgatttcggtatagatttgtagactacccgcaaagttgagtggggtgacttggtaacgaatgctgtaacggtgccaatcacgcatgttggcgactttctgcgaccggattctgagttgatgtccggaagcgagctgaatcaatttagtggtcgtcaagagtcccgttttcaaatcaaggctccgataagcatcttgtaaatcatgttcgttgagtgtaaagggagtctgatgatcaataccgaaagtcatgaactgagcgttcggtaaattgactaaatcttcattcttcacttggtggtcatgaacagtcgtggtggtttgatcatagaccccggcaacgtatgtcccaggataattgtccttgtcggcgtgactttccaaaaaggcgccccgtagaccaaaataaccgttaccaatggtcaacatggcttcttgaccattattacggacaccgtggtattggccgtagtaatccaaatgccattttaaataggcacttttagctttaactgcggctactagtccaagttgatcaacggcagcttggctaacgactgggatattaagtaaattagtcaaagctagcccgacatcaatgcgatcatagttgacaccgacgattgtgtctgagaatggataggacagtccgttttcaagaatagcagcatcgaattgaagtccggctaagcgaaccttgatgttctctagattttcaccaattgtttggtcagaattataggcaatcaggtaatgggccgttgcggcttgccccgatactggatgataagcgatatccatcgcgtcattttcaattcgcaatctaataagtttcataagtccacactccttagttcggtcattaaaaattgcaataagtaatcctaaatataaaaatattaaccataactacagcctagtctctttttacaagactcgcaaatattggtgatgaaagtaggggctgacgaggttgaaagtggcgttgttttcgaaggtgaatgaacaaagtgttctggcttgtgctgatgatacttggtctttgatgcacgtccggaatagtcggacgtgcttgcattaataactggtttgaaagtgatatcacgcttcgagccatgctagttgttgggtgaccaaagcacgaagcgccacaactagaatttgcgtagaatctagtcgtggcgcttcggttgtgtctttctaagaaggcctaatttgtaacggctaatctaagtgagcggggccgtcagtgggctgatcaacgagttcgagatggtcgatcggcatcatctggcgaatcttgattgaacttgtctgaaacctgagaatgacggggtctttgtaatttagttgctgctgaaagtccgttagttcagcccgccaatcttgttcaaaaacgttggtaccgactaatgagagttttccccgaagcataattgacgcatagtctgacagttggtaatagaataaactcgcttgacgccagttttgaatgttctgcgttgttgaagtttgacgactagtatagaagtaaagttcttctaggctccgtttgataggtaagggactgagcgctaccatggtcggaaagccgtccgcatcaacagttgctaacgtgaagacgggggcggtttggatcatatgtagggctgcctgacgagtcgtgtgttgcatacttagtcacccctttacacctcagtatgcaggaatcatgggggaaagtcatacgttatgcacaccgttttcagcgattaaaaactagggatgtgatatacttaaaccacttaacgcgtggaacgttatgattgattggcgctcccaaggttaacgatgttgttactgcagtcagttctgagaggacttatctaataatgaagaatggtacagtaaaatggttcaatgcggataaagggtttggttttattacgggtgaagacggtaccgatgtctttgttcatttttcagcgattcaaactgatggctttaaaaccttagatgaaggtcaaaaagtaacttatgatgaagaacagggcgatcgtggcccccaagcaacgaacgttcaaccacaatagtaactgttgggccgaaccattatcattaactggttcggtttttatttgaagtgacgggttgtcagctaaacaagaaagctaagtggtcggaatggattttgtagatgtttacggcattaagcatgagaattgtacgttagttgcacctgcgcgtgaatatcagcgggtcgttatttttatggacgcattgggccggcgctttgttgcaatgggaccggatccacaaccaactaaatatggaagtagtagccaacattggcatcaagcacagccgagtgcagctcctgaaggttattttcatattgatcaagaataaccctagcaattgagttacttagctacactgatggtaaacattagatcgttagaaaaagccccagggacgtcacacgcactttgcgttgtgcttcctgaggcttttttgtgggaataaaaaaatcagctttcacggtggattatcacggcgtgaaaactgattagtgtggttatatgatgggcagtcaggggtttgaacccaactgaaacataaacgctattaaaccagtgcttatgcggtgtttcacgtgagactttttacctttggcttaccaattggcttacttttactatgaagtgttaaaataacccagtttcccgctagaactgaaaatgttttttttaacgtggtacacgtggtacacgcagacaatcgttgatataacaacgtttcaaagcgccctaacgtggttcattacccagtacaacgtggtacacttagtaaaaattgtctgaatataccaagtttaaaagcctaaataattggctaacttgttggccgcctgttgattttggcccttagtgacgtgcgtgtaaacatttagggttgttgcaacgtcctcatggcctaatcgggtttgtacttctttaatggtggcaccagcggcaaacagggcggaggcgtgactgtgtcgaaatccatgtacggtaatactaggggttaagtggtagtcagtgatgatccgctttaaccacttacccggagtattaagcgatttaaaaccgttcttagtgttagcaaaaactaactgatccggctgtaacgtattaaaacctaaaaacaaataatattcacgttgctgtttatgccagcgttgtaatatttctaccgtcgtattgtctaagctgacagtgcggcggcccttttttgtcttaggggcttgaataatctgcttgccgcgtttcccttgggtaagtgttttattaacccgcaaggtcttatggacaaagtcaatatcttgccatgtcagggctaaacactcgccacgtcgcacgcctgcaaacgctagtacccggaagagacaatacttttcgggttctttttgctggtcaatgcacttgaagaacgtctttagctgatcgcgatcccagaagttatcgggcttatcaccccaactatcaggcttgaccggcattgtaatcattctagctggattatgtgtgatatagccgtgttttaagccgtattcaaagactgataccagataattgtaccaacgcttgtaattgtacgtgacttctttaaaccatagattaacagcacgctggcactggttgacggtgatggttcgtaaccgcttgttaccaaacaacggcaagatgtgattatcgaacataccagcagtccttgcccaagtgctttcacgaacggtattaatatactggtcgtaccattcatgatagacgtcaacgaagagaatattgttatcaactggtaaaaccggttcttgctgtaactctacttcaattctggataaagcaatacgagcagcgctttttgatttaaagccccgacgccgggttgatttctttttaccagtttgaggatcaacacctaaataaacttgaaactgataacgggtattcccgtccttgtcctgatacttcttgattgttgccatttataatttcctccataacgtaccttgagcggggcagtgttatgtagaaattagtcgattaaatagtaaagtatttgtaatgataggatttaccgatatctctaattaaaagcttcaaagtatctccagatttgtattcatgatcaagtttaatacttttatcaataacaaattttttagcacctccaaccaatatgtccatgatatctgacttaaaactcagaggcaagcaactgtatatttcgtcaaagccgtcataatctcgagttgcaatattcgagtttaaatagtcgtcaggctcataaataaacctgaatgaatcttcagtgtcaccagagaccacatgcaggagtgcaaagggggcaattttgggatctgaatcatattcgtcgtaaatgcctactttatactcgaatgtaatcagatagggagaatattcaaaaaagttagatggatctatctctaaatagttacatagcctatctattgtgttagttgcaatatttgcatccggattattaattatattagatattgtgtttctagatattttggtatcatctgaaacttgtttattagttaactgacgttcggcaaggagcaccttcaatctgtttgctagcatatagaacaccatccttcattcaaaattatagcatttaataatatcaatgtgcaaacacacattgacaaaagaaaaatgggtgtgtagtatgtagatgtgtgatatctaattttaatgtgcataagcacattgaaatacatggaaaaaggtgagaaataatgcagaatgaattaccaaaacaaatgaattacaagcaagcgttgaagtttttcaatattgggtcgtataacacgttatattcgtacattaaagaggggcttaaagttacacagataggtagtgttaaaaggattgatcaagatgacgcaaacgagttcttagaagcacacaaagtttaatgccttgagcggggcagaataaatttaaggaggtgatttcatgatagcaacaacaatcctatgggcaatcaagtttatgattgtgtcgtttgttggcaaagtggtggttaagttaatcaagaacccgcgtcggtattttggaatgtgaggtcagtcgcatgggaaagcatacaaaaaagacctactttactttgacgagtagtaggtcgaatagaaataatcaaaaatatgctttcccttattttaacacgttaacacggttatatgaagggaatttgtaatgaagaaaactaaagatttagatgaactagcgtttgaggctggatcactcgtaacttcaatagatgctttagatgattttgtcgatgtacacttcgttagtaacaatatagattattccgaaaaattgagtggactaatcactgtcataaagcgatatgcagaagatcactatgcagatattgatgagcttaatatgtttggcggtgttgaaaaatgaacgagttcgcaacactcgataaagccattgagctggcccaacaaggctattcagtttacccgttaattgagaatatgaagaaaccgcccaaaggagtgtcaggctataaagccgcaactaatgaccagaataccatcttagcatggtttgaaaatcacccgtattataacttaggcttgcgattagacacgtcccacttattggtagttgatgttgatattcatgattctactaagaatggaaaagatagcctgatgaaattacagtgtcaaggcaagacactttcaccagatacgtacattgaaaagaccgctggtggtggtcttcattacttctttaagtataccggagataaggttcgcaaaattgacgtttggcccggggttgacttgctgagtgacttcacggtgatttcaccaagtgagattaacggcaaaatgtatcaacccttagatggcagaaccttggctgatattaagccggctcctcaatggctagtcgataagttggcgggccaaaaagtgaactggccgtcagaacgcgcctataccacccaccaaaaaaagtataccggtcgcttgttagatgagatggtaactgggacaacccagggcgatcggaatgcttggttgactaaaattgccggtcgtatgtttggcgtcggtgctagtcctaagacagtttataacatgctgtcagtgatcaatgattcgttcgttgatccggcactaccaagcaaggaagttaatgtgatttttcaatccattttaaaacgagagagtaagggggttcattaatgggcaaagcaatggatttaccagcagagacccgagaagcagccaataatgttatcaaaatgcaacgtgacgctgattggcaaaatgatttcaaaaaaaattctgacgatgggatcaaaacacagtctctttacaatatccgtttaattatggaacatgacgaaatgttgaaaggactagttgcctttgacgagttctcggaacaaattgtcaaaacaccacaagcagacaattcactgttcaaaaaaggtttttggaatgatagtgatgacacgttattgagaagttatattgaagatcattacaacttgttattcagcaaggaaaacattaccgacgcggtagttacagaagcacgccgcaagacaatcaatccggttaaggctcgtattgaagcggtagaatgggacggccagccacgtgctgaacgttatttcattgattacttaggtgccgaagataatcactacacccgcaccatcactaagaaatggctaactggtcttattgcccgggcctatgttcccggagttaagtttgaaattgtccctatcttagagggaagccaaggacttggcaagagtacggctggtaagaatctatacccggataaattcaatgattcgttgaaaggaatgggtaagcagaaagacgattatcaacagttacaaggtagttggattattgaagttgccgagctttccgccatgaaaaaaacggacgttgagggaattaaaaattttattagtgcacaatccgacacatatcggaatagttacggccgctatgcgttgccacacccgcgtaaatgcgtatttattggcacgactaaccaaaccgactatttaaaggacgcgaccggtgaacggcgcttctatccacttaaatgtggggtcaacaaggctaagctagatgtatggcacccggacgagaattacatgcttcaagtattggcggaggccatgtgctggtttaggaatggcgaaccgctatatctggatcaggccaccgtgaaagaggctaaggcgtaccagatggctgcggaagctgttgaccctatgcgagatgccatcgaagcgtttttagcaatggaagttcccacagattggggaaaaatgagtaccagcttaaaacaaagctatgtcagtgactacgggcagcaatctaagtggctacaagatcaagttagtaatgaacggaaactactcaatcaaacaacaactcgggaaattatggaagttgtcttccataaaacagttgatcgttatttaaccgggcgcacaaactcggaagctaagcgaatcaagttattaatggacaatatggacggctgggaagctaaaagaattagaatgaatggccaacgtccacatgggtatgttcgcgtacaatgatcgaaaatgctaagtgtaccacgttgtaccgggtaatgaaccacgttagggcactttgaaacgttgttatatcaacgattgtctgcgtgtaccacgtgtaccacgttaaaacgaaaagtttcaagtacaggaggaaacagagaaatgaaagtaatttatccaagtttggttgagcaagctttcaacatctacgttaaacaatatggaccagttgtctcaaatagagttaatgaattaaaatcgtgtatttacagagtcttgattaaagatggtgtgttagatcaaaatggtgatccaactcaaaaagcaaaagataaaggattggttgggagctttaccctaaatgaagacggagaatatgagccagaaactgtaataggcttaaaactcatgtatcccatgtatgcacaatttagtgacgatcactttatgaaatcaagtcaagggtggttagctgacgcctacgttatccgaagtatttcaaaccaagttttgaatgatccttctagtgatgagggacaacgccaaagtgcgtacaagatgttggaacaattagatgattaatatgtagaaaggatttaactataatgattaaaacaaaaacgattatgcgaatgtctgtacaagatttagaccgagcaattaacctagaattagccaaccggattgatagtgacaatgtcattgacattaagttttcaagtaatgcgtttggggcagacctagattcttcttctgcagaatattgcgccatgattatttacaagtgaggttagctaatgaggaactataatctaagtcgattaaataagcgggtacagtttggcaccgtcaagtcagttgaaaatccaataaacggcacaaccaagcaacaattcgtgccactgttcactgtctggtgtggtgagtatacgttgaccatcagtaacacgattagccttactggtacgactgcgacaactaaccagctaattgcggtacgccatgacgatcggatcacaacgaccttggaagcaatattagatggggtgacgtataaggttgctggcgttagctctgatggcgaactgaatgcctatgatgtggtcacactaacaaaggtcaacggtcatggctaagccaatgaagcaatgtgagcacccgggttgtcggacactagttgcctatgacacacgctactgtgagaaacaccgcaaggcaactaacaagtggcggtatcacaaacgcatgtacgattcagatgagagtaagtaccaacagttctacaagtcgtcagcatggcgcaagttgtcacggcggttccttgaaagcaatccggtatgtgtacagtgctaccaagatggggtgatccgtaaagccgatgtggtcgatcatgttatcgaaatcaaagacgattggtcaaggcgacttgatgaaagcaacctacagccattgtgctaccgacaccataaccgaaaaacgggattggttagagaacaacggaaacaacaaactaaataatcaatgagtgtcgtgcttaaaggtgcggcgcttttttaagtatctgctaaattaaccctattacatactataacagtaaatgttcattttaacgtggcacacgtggaacacgtggaacaaacattgatataacaacactttgaagacctcctaacgtggcacatacgtggaacatacctggcacaacgtaacacacacctgtcgtaacgcactaacttggtgcactagctgactcgctaagatgacgtgacaggttgcttgtgctacctaagcttaacttagataggtaaacaaaaagccgcccgttaaggcgaccgatgacatctatgataattaacctgacagttaagttaattatatcacgtgaaagcgagaaaacaatttgtaggtcgaaatttcatacccacaattcaagattcatattgaaaggtgtttccacagtagtagatctgcgcaatactgcgctgaactttcagccgagctactaagcggagttttccgctgacctaaccaacccgcattttgcgtctacgttgccaaaagtggcaattgactgcgccaagttttcggccgagtgagcaattcaagttggcggcttaattttcggccacgagactaattcaaaacagcatgacagcccagaaacgttgatatgggggggtatggtcgaccaaaaaggagcggacagcatacttttgtgtttataaaagtcccttttgaactttgattttttgcttattttgctggattgtgaaatatcactactaataatgcgaaatttaaacaaatagccagtcagggggttacatgtaaatgtaaacatgttattaattgcacttttcctaaatgtgtgcgataatatagatataataaacggattctggatatatgtatcaatcagccgctatgggtctaacccgtgggggctttttggtacgtaaatttaaacgaaaggagtgctccgaatgagccaaaaagtaaaagccttagccagtatgaagaaacatttaaccaatgatgagcgtgatcaacgtaaagacgctgaaaaagcgttatttgattatccggtgcttgatttaaccccgccagattggttacatgatcgggccttaactgaatggcaacgggtagcgccttatttaaaggccaataccccaattagtgaacttgaccgggccatgttagccagttattgccgcgcttatgccaccgtacagacatgcgagaatgatattcgtaagaacgggctggtacaaactaatcaagagactggcgtacgtaagccgaacccctacgtggccttgcaatcacaagcaatgaaagatttaaaagccttagccaatgatttaggcatgtcgctatcgagccgggcccgcatggaattaaacaagcagaaagataagacacccgaagatactttcgaggcgatgttgtcatgattgaatatgttgaccaagttttatcgggccaagtattggctggtcaaaagattaagtgggcgtgtgagcgatttaaacgcgatttaagccgttctaaagaaactagctttccattctactatgacgaagacgaagcggcacaggcagttaaatttatcgaattaatgcctaaaactgacggtagtcaacttaccatgcaaccctttcaaaaatggattatcagtgagttatatggctggcgtgaaaaaactactggtaaccgccgttatgatcgggcgttcattagtatggcccggaagaacggtaaaacctatctggcttctggtatggccgctaatggtcttttaagagaacgtcagcccgcccgcaaccggcaagtattattcgtcagcaacgcccttaaacaagctaaattaggctacgacatgctttcaagtgggctacggcaagtccgcaagcaatcgaagtacatgcggcaacggattaaggtacagaagcaagccattactgacttagaaactgattcgcaagccttggcccttgccagtgataccagtacgcttgatggttatgccgggactaccgttattttagacgaatggcacgaagctaaagaccgcaaggtgtacaacgttttaaagtctggtcaagcacaagaggataattctctactggcggtaatttccacctctggccttaaccttaatgtcccaatgcacgccgagtatgacatgctgacggacgttttaaagggcaaaaccgaagctgaccgttattttgtggcaatctgggaactggacgaccgcgaagaagtttacgatcaagctaattggatcaaggcgaacccgttattcagtgaaccacacgttaagcaacgcatgacggagaaaattcaggccgatgttgaccttgccattaaacaaaataatctcattccggtactggttaagaacttcaatatgtggttgcaagccagtgaggacagctatatttccgcggacgattggaccgctggtaaattggcaaaggtgcccgacttacataatcgcgacgcctatattggcattgatttatcaaaaagtaatgacttgaccgcggttagttggctcgttccaattggcaacggtcagttttattgtgatagtcattcgtttgttggcacgaagtacggactggattctaagattaaacgtgatgggattgattaccggtcaatggagcgcgctggtgagtgtagtattactcgccttgatagcggtgtgattgattatgacgagctatttgattttgtacaaaaactagtcggaaaatacaactggaaagtgaaagccgtcgcttatgacccgtataacgcgcaaacgttaattacaaaattcgagaaattaagctacccactgtttgaagtgcgacaaggcaccaagactttgaatattccaacccgcaattttcgtgatcagctttacgatgacaagattaaacataacggtaacaagattctcgcttatgcggtcaataacgccatcttgaaagtgctaaacaatggttggcaactagataaagcccgcaatagtaaccggattgacccgattgcggcgttgattaacgcgtttgtagcgggtatggactattaccaagaaagtgaggatcaacaacatgcagaagattactacaaaacagcgactgcggcagatttgttctgattatgtacaaacgatcctgttggtgattggcttaatctgcttagtgattggttttggttgctggatcagctggcaagcggggttaatattggctggtatagccatgattctgctggccttactaattaattatgaaaagcaaagaggtgattaaatgagtttttttgttaaaagcaataccaccagcggcacacatgatccgatggctgacgctttggttagtttatcaagcaatgacccctatacgtttgtgagtgcggcggtgttgcgtaatagtgacatttacgcggcaattaacattattgcgagcgacattgccagcaatccgattgtttgcgatacggccatttttaacacgatgattaatcagacccccaatagccaaatggacggctaccatttcaaatatgcgttggcggccaacctgttactcaatggcaatagttttgcggagattctgcctaatcacacacttaaatttgtgcaaaataaccaaatgacagttgaacaagatgacgtcagtggggcgttgacctacacctataccccaattggcggtaatagtcgtcagattgcgcctaacaacattttacattttaaatatttcaccaaagacggcgtatcgggaattagtcctctatatgccctcaaagatgagcgccagattcagtcggccggcaataaattgctaaccggcttttttactgctggtgtgcacggcaccacgattattaaagtccatcaatctgatttagggccggaagctaagggcaatattcgcaaccagtttgatgaagccaatacgggtgacaacgcgatcaacacgattgtgaccgatgacacgatggatattagtaacttatccttaaataccgatgtgttaaaactggtcaactcgaatgactggacgacccgacaaattgctaaagcttttggcttaccaccggagcgcttaggggttgaaaacgatcattctaaccaagagcaaagtggcgtgcagtatctacaagggacgttgcaacattactttgatagctttaccagcgagctgtcgttcaagtttggtcatgactttacgtttaatacggacaagctattgagccttgatccgcaaacgcaacaagcccaagcagtggctggtttcactggcggcgttatgagccgtaacgaagctcgggctaagattggcttaccaccaactgacgatggcaatattttcctaaacttacaaaagaatggagtgaatacgagtgaagaataagcaacgatttaccttggcggctgaactgaaagcagaaaaacgtgacgccgtcccaaccgaacccgaaaatcaggatcagtccaattcaggtgaaccagccacgcaagcccaacaagttgacggcaagccagttatttctggttatgccgtggtgttcaatagcccctcattgaaaatgagtacgaatgatggcaccgaatttgttgaaatgattgatcccgccgcccttgatggcttggatttatcaaaattagtgctattaaatagtcataattgggcccagccattggcccgggccgacaacggaaccctcaccacgagcgttgatgatacgggtttaaagtttacggcggagctagatcctagcgttagttatgcaatggatacgtataacaatattaaaaatggagtgattggcgggtgctcgttcacctttgatttagacaatggcgatgatacttggacgcaagatactgcgagcggtcaagttacccgaacggtcaaccatatcaaagacttatacgaattaacgactacggctattccaagttatggacagtcgagtgttcagcaagtaattcaaattgaaagtcgtagttacgaaaaatttatcaatcaagcaaaggagcctgacaacatggcaaaacaaacaattattgatcctaataccaacgacaatggcaacgaaaacaaaactggtattcccgcctttgagcaatatgtacggacacacggggaaactcgggacggtttaaagacggacggtgccagtgccgttattcctaaggaactgattacccctgttttccaattaaagcaatctaattacaaccttgcccaatatgcaacagttaagcaagtttctagcggttccgggacttatccaattgccactagtcaacaatctgcggtactggctactaaggacgaactagcggacattgccgacgttgacgcaaacatgtttacggaagtgccgtttgatgtgaagacccgggcgggtaagattgccttatctaacgaagtggtggaagacgccgaggttgatattgttagtgaagtcaaaacgcaattacaacaattggttgataatacggacaacacgcagatcatgggactgttaacgggtagcaactttgctaaagcaacggccaccaatattgatgatcttaaaaagattttcaatgtgacgttagatcccgctttgagcaagatgtggctagtgaaccaatccgggttcaattaccttgatacactcaaagattccgagggtcgttacctattacagccgaacccaacggcacccagtggtttcaccttattaggggcaccagttgttatgattagtgataagttgctggctaacaacgcggacgggacgttcccaatgattgcgggggacttatcacaagccgtggctgttttccggcgtaaccaagtaaccgcccaatgggacaagttcgaccagttcagtcaaggactttccgtcattgtgcggaatgattatgaagtgattgataagaccgctgtaattaacgtggcgttaggaaccgcaactgctggtaaataatcgtacccacttttgggcacggctatacaaaggggtgtctaaaatggacaccccctatacataaattaaaactaagggggcacgattcgttaccccccctaaaaaggagtgattacatggctgtaaccgttgatgatattaaactaagcctgcgaattgatgtgaccgaagatgatccaatgattaaaagctatttagacgccgccgaggactatgttcagacggccgttagcaaaagtgaggatttgactatctacaaacagtacgattttgccgtgtccttgctgacgcaattctggtatcaaaaccgagtaaccgatatgacaaagacaccgtatcaagttgtcagcatgatccaacaattgcgcggattagtaaccggataagttttaaagtgaatgtgtttcatgtgaaacaattataagtgaaaatatttgttttaagtgttataatataagtattcattgtgttgatattagtcggaacggggtgtaatagccccgttttttaatacatatatctggaattagaaagtgtgattccaatgtgtcaagatgttaagaaaattcgtaatttattaaagcaatatgccaaactaaaacgtgatttcacggcttttaatcaagtttctagcccctcattcgatggagtatcaagccatagcagccgaaacggcgctgaaagccgcctgataaaccatgttgacctgtcttaccagctaaaagaggtcgaagacgccctcaatgcaattgatgatccacaatatcaatttatcttacatgattacattattgagaaacgtttcagccggaatgaagcctgtgaacaattatcggttagcgttagcaagttcaattatttaaagaaccgggcacttgaagtgtttaaattaaactatcttcgaactccgtgatatactgaacacagttaacatattcggaagttttaagtatcattaaacttgctatctataattttcttagatgttaattcggctggttactttgatttagtttctaggaggaatattaagtatatgcaaagtggtacagtgaaatggtttaacgcggataagggctttggatttatcaccggttcggataataaagatgtattcgttcatttctcatcaatccaaacagatgggtttaaaagccttgatgaaggtcaaaaggtaagctatgaagttgaacaaggggatcgtggccctcaagcaacgaatgttgttccacaataatttattttgatactgatgaaactgctttgtaataaggcagttttttattttatggcactgaaacatacgggaaagcaatgtgaaatatggactttacagatgtttatggcattaagcatgaaaactgtacgttgattacaccaactgaagaatatcgtcggataatcatatttatggattcagttgggcgtcgatttgttgcgattagtcctaatcctgaaccgactaagtatggttctgcaaaaagtcattggaagcaaggaaagccgaatgacgcacccaaagaatattttcatatcgacaaaaaaaactgctaaccaatatggttaacagtcactgccccgcgcaagtattgagtcactggaaacagtggcttttttgttatatttctggcttactaattggcttacttttattgaaaaaagatgacaactgatgataacggtgcttgcatttaaaacacaaaaaaaccagtaatcacggtgtttttgacactgcatgaaaactggttaatggtttatgatgggcagtcaggggatcgaaccctggacccacggattaagagtccgttgctctgccagctgagctaactgcccataactcaacaaaaaatataatatcatgaattttgagttctgacaacactatttcgaaagttttttcaaaaaaagtgattttttgagtaattaaattggtgaaaacgattgcttgaactggcaaatgatttcccgggaaatactacggccacgcggattagcaatcaaagaaagccaactacatttgtgatatactaaaaccagtgttgaatttagtttcaaccaaccctgacacgagaaaggacctgttttctcgtaatatatcgcgaatcaccctaaaaattgaaatgtaaacctgttttcccctaaggaggaagaatcgttatgaaaaaaatcttagtagttgatgatgaaaagcccatctctgatatcatgaaatttaatctgaccaaagaaggctatgaagttcacgttgcagctgacggagaggaagccttacaaaaagtggatgaagtccaccctgatttgattttgttagatttgatgttgcctaagatggatggcttggaagttgctcgacaagtacggaagaactatgatatgccaattatcatggtaacggcaaaggactctgaattagacaaggtgttgggcttggaactgggcgcggacgactatgtgaccaaaccgttctcaaaccgggaactcgtggctcgagtcaaagcaaatctgcggcggcaaggtgcaccaagtgcccaaccagctgaagttgaagaaaattcagacattgaaattggcgatctggtgatccatccagaagcttatatggtttccaaacgcggtgaaaacatcgaattaacgcaccgtgaatttgaactgttacattacttagcccaacatatcggccaagtcatgacgcgggaacacttgttgcagacggtctggggctatgattactttggtgatgtccggacagttgatgtgaccgtgcggcggttacgtgaaaaagttgaagataacccgagtcatccaaaatggctggtgacgcggcggggcgtgggttactatctccgcaatcctgaaaatgagtagaggttgctaaaccgtgttgagatttaaacggaaaaatttttttaaaacaattaatttcaaaattgcgctcgtgtttgcccttctattattgattacgttggaaatcgtgggtgcaatctttgtgaaacagttggaatcaaagaacatccaggattttaaacagtcggtgcaaattccaacttatattgataattcgttgtccgaacaattgaccgtcagcagtacgcgcaaggccaacggccaaatcaagacgattttgtcgaactacaacaatacgaatgttgatgaaatccaagttgttgacagcaaaggaacaattcgtgggacgagtgatgttaatgatcagtcagtagttggacaaaaaacgaccgatcgaaacgtcaagaatgcgatctataataatcgaacttacactaaaagtacctatgacactcagaataatggacgctactacgtttcaatcgtgccgctatatagctccaattcagcgggtaatagcagtcagttagttggggtactgtatgtacgggcaaatatgaagtctgtctacagtacgattaacaacattatgggaatctttgtgattgcgtcacttgctgcgatggtcttgggactgggaattgcaatcattattgcccgggcaataactcgtccaatcgaagaaatgaagcagcagacgcaacgaattgcccgtggtgattatgcggggcaagtccgagtttatagcgatgatgagttgggccagttggctaaagccattaataacttgtcgattcgagtggaagaatcgcaagagtcgacagaagctgagcggcgccggttggatagtgtgctctcacacatgagtgatggcgtgattgccactgatcgccggggtaatattaccatcatcaatgaaacagcctcggactttatggatgttacggccgaaaaggcaatcggtaactcgattttagatattttaaaaatccgtgatgattattcattgcgtgatttgattgaaaatcaagatgaattgatgcttgatttttcttcgaacgagcgtgacctaatcttgaatgcctacttctcgttaattcaacgggagtctgggtttattagtgggttagtctgtgtgctccacgatgtcacggaacaacaaaagattgataatgaccggaaacaatttgtttcgaacgtgtctcatgaattacggacaccactgactagtttgcggagttatattgaagcactgagtgatggtgcgtggaaggatcctgaagtggccccaggatttttgaaggtcactcaagaagaaaccgatcgtatgattcgaatgatcaatgaactcttaagtctatcacggatggactcagggaccacccgggtcgatatggaattggtcaatattaatgagatgttcaattacgtgcttgatcggtttgatatgatcttaaagaaggatgataatccagctaagtattacactattaagcgcgagtttaccaagcgtgatctgtgggttgaaattgataccgataaattcactcaagtattggataacattatgaataatgcgatcaagtattcacctgatggcggtgtcgtgacttgtcgcctgttagagacgcataaccaagtgatcattagtattagtgatcagggcttgggtatcccacgggccgacttaggacacgtctttgaccgattcttccgagtcgacaaggcgcggtcacgggcccaaggtgggacgggcctcggtttggcgatttcaaaagaagttgttcagatgctcggcggtcgtatttgggttgatagtgttgaaggtaaggggtctacgttctatatctccctgccatacgaaccttatgaggaggaggacctttgggatgacgactcacaagcttagacgctttatcttacccattttattgacgattctgatcttattgagcgtggttttatccatgtatatctggttgaatccgtcacgctatgagcatgaaagcaaggttagtacgacgtcatcgaactcttcgttgacaactcggacaatcgatgatatttatttaccgacacaattaattcacactaacagtcagggtggccaatccctgctgattaataaaaatgtcagcttagtcagtcaatttagtgagcagttacgcaaatgggatgcgcggagtatctctaaagttcgcattacgtcggcaaaaagctaccgtgcgctcttaaatggaactgattcgtacgtattgaactttcctgacagtattactgtcagtatgtttaatacggtcttcaggcaacatctcagtaattttcgctcctcggaatttagtcggatcgtgattccagtcaatgatacgaatcacatctactttttgaatgatgaccatcatgagatttatagtgttcggttgaagaaaaaatctctgtcgtcgttgaaaaaagttttggcagtcgacaaggtcaaacggattgctgtcaagatgacctatgaggataatacaacgtatattgattatccaaagcaagttacgatgcaacattatagctacttgatgagtaaagcggctgcgagtgagattgccaaccgattactagatgcggatggtaattcgaccgtttcagtgcataatcgcagtggtaaacaggagtatacaacgggtagttacaagcgcatgacggtggattctaagctaggaacagtgtatttcgaagattatagtgattcaggaaccacgcggaacctatcactgactaatcagctaaagaagagcttcaatttgttaactagtctcggtgtcccaatggataatatccgctactacggttttgacgcaacgagtaatagtgtcatttaccgaagctatgttgaagggttcccgatctttaatcagaccgaaaatggcgatgtccggattcagctcacttctaacgggttagaccgttactacttctcactgtacagtttgcaggtgccagtaccaactactggtcagaagcaagcggtgaccttaccgagttcgacaagtgtgttaaaacgtctgaaggccgctggttataaagacagtaaaattggcagtattgaacttggctacgaatggtcacagaacaagtcgtccaaactcgtgatcgacctgacgccgacgtattatgtctactataatggcacttggcggacatatacgtcgatgttaagtggatcttaggaggtggccgcatgaattttcggagaattgagtggattttcctactagcatttgttgttctagatatcttcttgggttttatgttcgtgcaaacgagctctaagtcgacacaaacgactggtgatacggcgaccacgataattcgtgaaatgcgcgcagataatattagctttaaaaacccggacacgagcgaagggacgggttactatattgcgggcagtaacgagagtggtctcaaacaattgttgagtcagttaactgaacagacagcccgggtgcaaagcggcggtaagctcgtgagcacactacgggcaaccaccactatcgatacccgcaatcctaaagcggacttgacgacgtttatgagtcagcggaccaatgtaatccatggaaccgagtacgtctatgatgcggatttgtcgtctaacggcgattacgtttttgttcaaaaggttgcggatggcgagatcatgactggcgctgggcaagtccacctatttgttaataaaaacaagcagctgacaagttatactcagacgtacgtcaatcacgtcaaaactttacgcgaaaaggctgttacgatcagtgaaaaaaaggccctggttgcgttgtatcaatataatcaggtggcaagtagttcccggatcgtttgggcaaagcttgggtattctcggttattgaaattgaaggatagtagtgtttacgtcccaacgtggatctttgcggtccggggtaagaatagttctaacgttacactgcaccgtatcaatgcctttactggttcttcaatgaagaacggtagtacggctagtgatacgagtagtttagatgcgacggtcggaatgatgtggaatgcaattgattagtgaaaaccagtttaacgactaggtgtcgttgtcgaataacgggtgctgtgaagaagagtgtttttcctaacaggcccgttttttggtgactagatttttgactagttgtgatacgccaatgtcgaggtggcatgacgtagcgtggattgctcagcgttgatgttcgcggtttcgtgtgagtttaatggccggtaaactagtgtgcgcatacacgacagtaaactagactaaccgcgtgatggcgatagtcgtggacgttaagtttgagcacttgcaggtggcttgcttttcaaccccgctaaaagcgtgtatcatatgaagatagtaatggatttcagagataggaagagcctaaataatggtattaaaattagcaacggatgatatgaaagtaagcattctggcatcgggtagtacgggtaacgtgacatacatcgaaacgccagagcacaaagtattggttgatgcggggctaagtggcaaaaaaattgctaatttaatggcgtcgatcgatcgtgatattaatgaagtcgatagtttatttattagccatgaacacactgatcactgccattctgcggggattttagcgcggaagtatggtatggatgtttatgctaatcaggggacctgggacgcaatggcgcataaaatcggcaacgttcctgccgaattatgtcatgtctttgacccgaacacgacgcttggactaggtgatctcgacgtggaatcatttagtgtgtcacatgatgcggccgagccacaattttatgaactacatcatgccggaaaatcgtttgtcatcattacggatacgggctacgtttcagagcacgttgaaggtgtaatcaaagacgctgacggctatttatttgaatgtaatcatgacttagaaatgttgcggatgggtcggtatccatggccattaaagcagcgaattattggtgatgagggccatttatcgaatgaagatggtgcgaacgccttgatggatgtgattggccggcataccaagcggatttacttagggcatcgtagtcaggataataacttgaagtccttggcgcatttaacggttgcttccatgatgacggaacgagattttggcgttgagcatgattttcaattgtacgatacggagccagaacaagcgactaagttaatcacgttataggttagctttaatgtttcacaacgcttcagtcataaaaaaatcacactttttcgctaaaataaacttaaaataagcattagtagggagggatcgcgtttcgacgcgcaattatggctaataaatcattaatcaaagtcgcagtaaccgcactagtagctggtttaatcggtggtggtgttgcttacggcggtattaattatttccaaaacaataacatcgcaacgtcatcgaccagtgtaccaactggttctaataaatcggggtcaacgtcaacgacgaacgttaaggtcaatgtcagttcacaggcgaccaaggtgtttgaaaataacaaggcggccgttgtatcggtcattaatctccaaaagaagagctcttcaagcagttggagtggtattttgggtggcgatgactcgtctggcagtgatagttcatccagttcagattctagctctagtaagctggaagagtacagtgaaggttctgggttgatctataagaagagcggtgacgcggcttatattgtaacgaataatcacgtggtgagtggttcaagtgccattcgagtgattatgagtgatgggactaagttgtcagctaaaattgtcggaaccgattctgtgactgacttggccgttctgaaaatcaattcttctaaagtaacgaagacggctagctttggtaactcagataatatcaaggttggtgaaacggccttagccattgggtcaccgatgggctctaattacgcaacgaccttgacgcaaggaatcatttcagcgaagaagcggaccgtggcgacgacgaatacatctggtcaaacgacggggtacgcgacggttatccaaacagatacggcaattaactctggaaactctggtggtccgttgttcaacattgctggacaagttatcgggatcaactcgatgaagttggcctcagataattctgggactagtgtcgaagggatgggctttgcaattccaagtaatgaagttgtgaagatcatcaatgaattggttcaaaagggtgaagtcgttcggccggctttaggggttgcaacctatgacctatccaatatttcttctagtgatcagaagtctgttcttaagttaccaaccagtgtgacgaagggtgtcgtcatcatgaagacgtactcaggttcaccggctaaagctgctgggttaacgaagtacgatgtgattacggagctaggtggcaagaaagtgaccagcttagccacgttacggagtgccctgtatgcccattcggttaatgataccgtgacggtgaaatactaccataacggaaaactcaagacagccaacatgaagttgacggaaactaccaaaacgttaactaaacaaagtaactaataaatgagaatttcataaacgtccctgactggataaagcagtcgggggcgtttttttaggttagtagctgaaatcatgaaaaaacgaagaatcgattttcaataatcgactaaatttgcgaaagctggcaatggttgcgacaaaagccgaacaaactggttgaaatagcagaaagcatttattgtcgaatttgatggtgtgcaaaagtgtggacaactttggtgataaattttagccgcgttagtcaaaatttatgaacagccggaaccacggggttgaagcttgtttaaaagttatccacaggcgccggactggcctgtggatttaattttaaaaagttattttaataggcctcggttcttgatataataggatttgtaaccggaacccacgaacaagtgttgctgtgcaaaactgtggataagtcggaaaggtcttgacaaaacgaggctaaataaatattgtggcgaactggcgttcaacacaatatattgattattgagttatgcacctgtggataactatgttaataacttgtgtaaaggcggtcaattatgaacatcaaaattatctgtgtcgggaaattaaaagagaaatacttcaaacaggggattgcggaatatgcgaaaagaatgagtaaatttgcaaaattccagattgttgaagtgccagatgaaaaggctccagagtcattaagtaacgcagagatggaaaatgtgaaggtcaaagagggccaacggatcctagaaaagatcaaggatcgcgattacgtatacgcgctagcaattttgggcaaagaacgctcgagtgaagaatttgcggcggaaattgataaactaacgacgtatggtcacagtgatattgatttcgtaatcggtggttcgctggggttatcaccggaagtgctgaagcgcgcggatactcagatttcgtttgggcgtttcacgttacctcaccaattaatgcggttagtgctgtcggagcaggtttatcgggcgtttatgattaatgtgggaagtccgtatcataagtgatgctaaaatttgtttttcaatagttacggatttattaggtgaataggaattctaatctgtttttgatggtcgtatttataacagtttagataaggctgcaaagaattacagttaccttactaaagtgtaagcagtatatagatatgcaattaccattaaataatggcgaaataagaaaggacggaacgatttttcagatgctgatattaaggctagattgaaatagcctggttatcactatactcaattgattgataatagcaaagtaagcggcaggtgctcctcaaaaaggcttgccgtttttgagtatacccaatcctcaagatgctgattgtagattctcaggtatatatagctagtgattttttgcgtacaggtgccacatccataaaatttctaataattttaattgacatttattagggatagttttatattattaatcgaacgttcaatcgattaaaagagggtgccaaatatgcgggaaaaagatttagacaaagagaagagtattatcgatgaagtaagtcgtattattctaaaagagggaattgcggatgtttcgatgtccaaaattgccaaagcgagtggtatttcttcgtcaactatttacgtttatttttcagataaagaggatcttctaaagcaggtctaccttgctaaaaagcgacagttagcagcatttttaagtcaaaatatcaataccaaacccaataactcagttaagtttgtccaacagtttatgtatgcgttatacgatttcggcatgcaatattacgaagcattaatgattattgaacaattcaataattcgcccattcttgatagcttaaaaatcaaaaaggaggaatcctatcaaggtttcgagcaactttttgaagcagtcaaacatacacctgaatttgtcatttcttcaccggcagttattttaggttttgtttacgcaccaattgttttgtttgttaaagccttaaaaacacgtcaaattgataataagacaattatgatcgatcaagtggttgtgatgtgtatgaatgcactattgaaaaaataaaatatcagaacatgatatttttttgtctataattaaacgattgttcgattaaaaaaggagagctatgatgactacaattaatgagatgcaccaaatttttaacttgcaaaagacacagtatgaccgtgcgcaaccaatgacctatgaagagcgtgtgactgttttaaatcagattgaggcattgattcgggataatatttcagaattaatcacggcacttcaagcagattttgggcagcgtgatccgctacaaattgtaagtgctgatttaaccggaccactagcgacgattgcatatattaagaagcatcttcgtaaatggatactaccagctaagcaacggtcgggtttgatggcattaactggaactaaacagtatgtttataatgaaccattaggtgtagttggtatcatgtcgccgtttaatgcaccaatcgatcttgcgctagatccagcggtagaagcgattgcagcggggaatcgagtgatggtaaagatctctgagtatacccctaagacagcggcactggtccagaaattgtcacaacagtatttaaatgaaaagaactttgcagtagtgacaggagaagctgatattgcggctcagttttcagcactggattgggacaaactagtttttacaggtggctctgaaactggtaagaaggtattatcggcggcggctcctaatttaacaccggttgttttagaactgggtggtaaaaatccagccgttgttttaccagatgctaacaagcaaatgacagctgccaagattgcgcgtagtcgttctggtaatagtggtcagatttgtttggataccgattatgtgttacttcccactgaccagttggatgaatacgtgcgcttaatcactgcacaacttgcgcaagcatttccaacttacattaataattctgaatattctgccattatcaacgatcgttcttacgatcggattttgagaatgcttactgaagctcggcaacggggaactaggctgataacgattaatccaaataatgaattggttccggacgtgaaaagacggctaattccattaacgttggcgattaatcctgatcgagatttacagattgccagaaatgaaatttttggacctattttatcgatctttacgtatgattcacttgatgaagccatcgcttttattaactctcatgaaaagccgttagccatgtacttatttggtaggagttcaaggcatttgaatcaaattatttcgcagacatcatctggcggagtagatattaatgagttatccttgcatgcgggttcgcattcaatgggtttcggtggtgtgggttattctggaatgggacgctataaaggcggtaagacaggctttgagacgtttagtaatcaaaaatctgtgtataagcaaggtgttttggcaaaatatactacgcgcttaatggtgccgatccataataaacgtaatgaaaagctgctgaagcgaatgttgggactatgaagtcgtgtttaatctagggcaataacatggttaggacttttcttcgtgtctatgactaattgatgtaaaatactagtataagtatgaacattaatatggatttttataaattgaataagacaaagtagcactggtcattggagattatgaagtaattataaaagatgatactcagattgaatatattctgagcttaatcaaacaggcatgggaaaagtatcgtcactaaaactaaaaacgaatcgcaggtgcatctatatcacaacaatcaaagaaattactgaagctatcaaggctgatcccgataacgctgaatatacggcgaaggggtgggacccattatttcatgtgttaccgacagccactattttagtgattagtcaggcaccgggacgtattgcccaaaataccaagacgtatttcaatgatgcgagcggggaccgacttcgggattggatgggcgtgacgcgggagcaattctatcaaagtgaccgcattgcagttatgccactagatttctactatcctggtaagggcaaaagcggtgacttgccaccgcgcaagggcttcatggataaatggcatgaaccgctgctagcaatgatgcctaacgttcaactgacgttacttgtgggccaatatgcaattaaggcttatttaggacgttcacggcaaaagacgttgactgcaacggttcaaaattatcaggattacttgcctgattatttcccattagtgcatccatcgcccctaaattatggctggcaaaagaagaatccatggttccaagcgaccgtggtgccagagcttcaacgaagggtacagattgcattaaaataaggtctacgacagccttgttaaggccagtgttcatagcttgttgactgtaacttttaagggcctgatttggttaaaaacgtggtaatactgagcatgaatggctcggtattaccacgtttttagtttactggtttatgacgatgcgcttagctagccaagctttctcacttgaaaaagatagttctatcttttataatgatatttattctctttgttcatcactatttaaaatataggagctaaaaattcatggaaacaattaaagcgattcacacccggcattcagtccgggcttttaaagacgaccctattgagccacagttattaacaacgattgttacagatgctcagcaaaccccctcgtggggtaattcacaaccatggcaagtctatattgcaacggggcacgcactaactaatattaagcaacactatgctactgccgctgagcaagggattacggaagacgctgatctcgccaaagtacaccggggtgatttttcggcgtttgctagccaaaatatggggcactgggtcggaacttttcggcccgtgatcgactcagacccgaccacttattgggatagtcgtgctaatctttatcgcgcaccggcgattgcctatctcgtgctcgacgctaaccctaatagttggtcaatctatgatttaggcgctttttcgcagacgttaatgttagccgcaactgctcgcggagtacagtcagtaccatcttatgaactggttaaatatccggccattgtacgaaacgcactcgggatgcctgcagataaagtagtggcgatggggattgctttaggctatgagaaacctgaaaaaccgttaaatcaatttcgaactgaccgagttgctacgccgcaagtcttgcacatcatcaactaatttagactcacttttgcagcagaaaccagctgtttaccagcagacactattgccaactgacaccgtttcatctaagatggagggtaacttgaacctgataggggaggctgggcaatgacgactaaacaacgaacgtacaaaattaagtcctatgtcaacgctagccatgcggtgcggtgggcaactggctccggaaaaaagcacacgcacacgtgggaaattgtttgtgaattgcacacggttgatgcgatggttgctttttatgatattgaaaaaaatttgcatcaagcgttggatgaattgtcaggtaaatttttgaacgacttacctgaatttaaaaccgttaatccaactgtggaaaatgtcacggagtatttgtttaccaagattgataagacattgcgagacaacggggcgcaactgttgcgaattgaagttagtgattcgccaacacgcgcttattgtattagtgtcaccgaataagattaatgaaggggccaccaagaacgacagttgcagctgttcttggtggccctgatttttatttaattatcgttttggacggacaactgctaaaaagtcagctaaagcctgcgggtcggtcaattgtcgattacactgattactgtcacgacaaatgtaattgccgttacgcgtgtaaggtccgagaccagatgacttggttgtcgacataaagagtgcgacgttgccaattgtttggcaaatggcacagacgcccttgactgtttgtggtgctagatctccctggataccaatgagacgatcatgatccgggattactaaatactttttctggttaccaccatcattccaacctaggtaagtcaattcgtgtaatgctaattgtgaccatacaggctgcttcaactttttgaccttgcgaaacaacttgcttagttgctttgtcgtcaaggatggaaacggaataattagcggaattagcgtttctagtagttgaggggccttggcacgggttagccggtccgtttgcaaatgggacaagaaattagcggtgattggatcgtcactaggaagcagtggtgtaatccgctcgatagcttgtgcccgtacgacggctctaatttgaagatcgtttacggcgagctcggcgctaattaactgattgacttgctgagtaatataactgtattgataggtggtaattgtcggttgcataatataattcctttcagattcaaaccagacacttctctgaaaggttctgtcgaaaagtgtcgctaacgagcagcacttttgcgtacagataatgatgccatcatcattaatcatctccttatttgtggccgattatagccacagcgataaacagtataacggatgttgttgattttggcaatagatggtgtctgttttgataggcaccttgcataacttatatttggaaatcaaataccgtaagtcctaaaatgtttcacgtgaaactttcgccacgggacactaaaacatcacgcaactcgtgagttacgtgatgttctcaaatacatattcgctttgaattgtgcttaattcgtgactgaatctttgacttgtttcagcgcattttggaccgcttctttaatagctcggctagatgcagaggcacctgaaacggcgtcaacgctagtggagttggctgccacaatttcttgtggaatttgatcgatagcggttaaaccaacatcttcactttcatggtgttgaataacatcgactgcttgaattttatggtcgttgtaagtcacacgcacaataactttgccacctagcccggcattagaactgccgagatattgatcagcggccagtttaacattagatgctgtttcgccatcaacaaggtcattaattccgttggcttcgttggcggtgacagattcactatctacctttggacgagcagcgttttcaccggctaacttaccaaagatcaaacattcggctaaattaccaccaccttgatagcagtttgcaacgataccgcctaattcaccagcgccgaacaagtgtggaataggttcgtcattgacgttgagaatttgggcattttcattgcgttgtggccccccttgcgtgttgaggacgtcattggtcgtagcaatggcatagtaagggccatcgtccagttgacgcatcgtttgcggatcacgatcaaattcaaaatcacgtcccacttctgtgtagtgattaaagtcagttaccgtctgttgtagattattagcaggaactcccaatttggcggccaattgtgcaatcgttggcgcggaaacgagtttggtcatgaatttcggatacggtaactgaccagcctgactttcttcttgtttgaaggcatcgtactgggtttgatcaaaaattaagtaggggtgctgattattcattgggattagccaagagccatgtgtgtaaacgtgtccgtgacggtgcttagcgtcttcttggaagtagcgtgtcccatcatcagcgataacgaaaatactaccgttctttaataaaggccagtgttcaatttgacggccccgttcattggcgtcttctttgaaggtgattccaggtaagataccgtgagattcataattggtcatgtgccacattttggcatcaacttcttgagccattttgataccatcaccgcggttatagagcgtcccaagtggtgtcagattatcactgtgcaagtaggtttgctttaactcaggattgttttcaaaaccacccatagctaaaacgacgccattattggcatggatattaagcagtcgttcgccccgtttgatttggaccccttggatcactttagtattaggatcttggatcaaatgttgtgcccgtgagtccaaccaaacgtcaatattgtcagctcgttcaaggactttttgccggagtagtttccataatgcagcgtctttatcacgtttgtgaacgagggcaaagtcaatcgtatcacttccggctagttctgggtattccgccatggttttcttgatggcaacggcatcaccgggtttaatatcatgtttccaactaacggctttaatccccagatatttttcaaaatatgctggaattttactcataccgcttaaataggcgttgagtgtcttagtaggggtactgaatggcgcgcccagtgcttgataataagcggttagtttatctaagctttcacccgtaacgacgtgttgggcggagtagcgggtgttgccaccttcacggccaaatggtgccgcatcaactactagtacgtgggcaccattatcagcagcaaaacgagccgctgaagcaccggcaccaccaaagcctaaaacgataacgtcgtagttaccgtgccagttcacattgagcgcgggcgtgccgttgagtgccttaacgtatttttcaaagttatcgaagcaccgttccaagaacttgatagaaggggcatcggtcatttgaccattctgatcaaaggctttagcagcgtagcttaacatgtattcattgccagggagtacctgagcatcaactccgggcgcattgagaatattgcgtaagtcaccttgagcacggcacgtcccctgtacgccaagggaagtaccaactaacatgaccggtttattagcaaaggggtggagctggtaagaaagccattcaataacgttcttgagtgcggccggaatggcatgatcgtattcgggtaccccgatgatcaccccatcggcctggctaattttatcatttaaggcttgaacggtcgccgggatatgattttgagttggttcattaaaaaggggaatccctgtaatttcattaacgtcaatggtagcccgttgactaaaatgatgcttcataaattgtaataattcacggttgtaagactgttgtgccgccgtaccaatcaaggcaatatatttcataattaacattcctttattagttttttagttggataagtacacggattgtttacgctttcaatataaatagttacctagaaaaaacaaccgttaattttaacgaagccaacagaatgctattgtgacaaggataacaagctgtgattaatttgacgggttgtcgaaactttagtgagaattaagcaagtggcaaactttattttagctttttataaattctatttataaaagtgtccgataaaaggcactagtcgctatgataatttcaggtatttttaatcgcaaacaggtccctgtaggctgtatataacgggttttattgcgacacctcaagcaactacaactaaatttaaattgacagacttataaattaagttatggtgatattgaaaaacggcaaacaaccgttaatggcaagatatgtgaaaatcttaacaattatatgaagattaggaggaagtgcagatgttgagtgaaataaaatggaagggctttctgttaccgctaatttttggaattgggttatggctagttacgccactacgaccagtagcaattagtattatggcgtggcacttatttgcaatttttgtggcaacgattattgcttgtattaccaagccattaccgatgatggccgtcacgctgattgggattgttgttgcgacgttaacgggtgtttttacgatggacgaagtcgctactggttttggtaattcgacggcgtggatggttgccatgtgcatgttcatggctgctggttttattaaatcaggacttggcaagcggatcgcctatctgtttgtcagtttatttggcaagcgcacgctgagcttagcatacgccttatcctttgttgatgccgtattggcgattggtattcctagcaataatgcgcgggtcaacgggattatgtatcccattattgataatctttctcgtgaaatgggatctgatccgaaacagggcacacagcgaaaattaggctcatttctagtttttaatgaatatgaagttaataatattacatcaggcttgtttttgaccggtttagctggcaacatggtggctattggtttagctaagatgcagggaatcacggtaacttggatgcaatggtttatggctgcttgtgtcccaggtattttatcgctactaattattccatgggtactatataaagtctatccccctgaggtgaaacaaacgccagacgcgcaccgctgggcaacgacgcgtttggccgcacttggaaaaatgacagctagtgaaaaaattatgtcaattacctttattttagcgattgttttatggttgatcgggactaaaattggcatcgatgcgaccgaagtaagttttattgcagttgttattttgctgattacgggcgtgttaacgactaacgatttgctcaatgaacattttgcttggaatattttagtctggttatcgatcatcatgatgatgtctaagaagctaatgacactaggctttttcccatggttttccaaaacgttaggtcatttactgaatggtatgaactggattagcgtgctcattatcctgtttttagcttatttttacttacattacatgtttccgagtgtttcaacacagatttcggcgttatatgctggctttttatccatcgccattggtgccggtgttccccatgttttagcggcgttactattggcatttgctggttcaatcaacttgtcaacgacgccgtactcggccgggcccgcggcattattgtcaagtacaggctatgtgactagtgcggagtggtggcgattgagtgcaattattggggttatttttaacgtcatctggttaggtgggggcttgctgtggaccaagttattaggcttttggtaagactaactgagcaatatagatgcggtaagtcgtgattgatcctgaccacgatttgccgcatctttcgtgttaaaattaggtattaaatagattgaatgggggtgttgacgtgaatgaacgcgatttaaagtacttctgttcattagttgagacgggaaattacacggccacggcgaccaagtttcacgtcacacaaccggctatttctgcagctttacgacgattggaagaagaataccaagcagtattactaacgcaggccaaccatcgggcccaactagtaacgacggcagcggggcggaccttgtatattaagtctaagcaactcttaaaagacgttgcgcagatggcactggaagttcatcacgctaatgagcagcaagttcggctcggattttccaatgttgcgggtggtatttggcttccccgggtgataaaaaaatttatctcagttgatttattagaccaggtcacaacgaccgttgctgattcagaacaattgttagttgacttgcggcaaggcaagttagacgcagcggttttttcaactttggtcccagaacgtgccacggatttacgggtgagcatcttagaggaacatcagatgcaggtcttggccaatgtcaatagtccattaagtcacttaaaaacgattcgagcaactgacttacaaggagtgcctatcatcgctcgtcctaaacacgcattaccacggttagcattagaacaatattgtcagcgcggccacatacagcctaaaatcgtctacgaggcagctaccaacgcgttagtcgaaggtctagttgctcaaaacgttggtgttggggtggtcattgcagattccgtagtgctaagtgatcaggttgtagggattccactagctgcccaagagcaattacactgttacatgcaactggcggtgcggaagtcctttttgcctaacgctaatcagcagcggtgcattgacgtcctacgtcaaattagacgggctaattaggtcttcagcactaatccaaaaatagcgctcgcattgactttttcagtcaacgcgagcgccgtcaaatcattattgagctaacattttttgagcgaattccttaacgagttcaatctgctcatctttgagcttgccgccagtactgccgatgattttcattcctttgccacccatgacttggtggaagtggccgatgacgggaatgcccttttcggtggcaatctttgtcagggctttgtctgaaaccatttctggtccgccagaagttgtgaatagggcgatttgtttgatcttagtcggatcaaggttcttcataaaagcagatgcggttttgtcgggtttcataaaataagtaccgccgccaaaaaagagtgtgtcagcttgttcgacaggtgtatcgatggattgtgctggaacacctgccacgctagcgatttgttcggcaaatgcttgtgtattgccattgcgagtttgataacgaattgctactgtcatggaaaagacctccgataaattagttgaaataagaccgttctcgcgatgagtaactgctcagggggactggttataagtttagaataatattgtaatatcaattctagtataaatcgttttgaaatcgattacaaaaatatagtgagcgcattcttgagggttaaggctagcttattcgattgctggaatagtcacagcaatctatcgcggttacgcgcatgacgatgttgtatcttaatggttattagcggagcaagcgggattcttgcgggcataatattggtgatgatacgcgattagtgtcgttatcgtcagtaatttaggaggacggcgaaatgccaaaaatatattttttatgtacgggcaatgcctgtcgcagtcagatggcagaaggctttgcacagcaattattgggaccaaactggcaagttgctagtgctggggtggagacacatggcctgaacccactagctgttcaagtaatgagcgaggtgggtattgatatcagtgaccaggtttctaaattaatcgacctgacctatcttaatcagtgtgcagtcgtggtgacgttgtgtggtgatgcacgggatcgctgccccgtcactccggcaacggtgaccaggctacactggccattgcctgatccggctcgcacgactggcagtgttagtgaccaattgctagtatttcgacaggtccgagatcagatcaaagcacgagtgattgatctggcacggaccttgaatgtttcggcaacgtagccgtgcacaatgaacggttgcagtattaagaaaataaatccaattataatgatgcgcatgtaagctaagaagggctggcatgcgtttttattagctaattaaagttggaaccacactttagttagttataattgtgaaccaacacacatgtataaaagctacagtttaatcgtcgtaagactagtacttttatccattactcaaacaaatttagtgggttaatatgaaagcgtagtcaagataaatgaccggtcatcaggttaatgtttactgataagttaataaaatcacaatttcatcgaggaggacgcaaaacatcatgaaagattttaaagataaagttatgtttatcacgggtgcggcccacggatttggtcaagttattgctgaaggcgccgcggatcggggtatgaagctcacgattgttgatatcgacgaaccagctttgaagaaaacgtaccaacatattctcgacaagggtgccgaggtgttgatggttaccgctgacgttacaaaggaagctagtgtcgacgatgcggttgagcaggccatggaaaagtttgggcggatcgacctactgattaataatgccgggatcgcgctacctggccgaatttgggaattgccgactcgtgattgggaatggatcatgcatatcaacttaatgagtcaagtttatgcgatgaagcgcgttatcccaattatgattcaacagaagacccatgcggatattcttaacgtggcttcgattgccggcttagttgatacgcccggaatgccttcttatcatgctagcaagttcgcttctgttgggatgactgaagcgaccgcctatgacttacaacgggctaatattgatatcgacatgcacgtgatgtgccctggctttgttcagacggatctctatcacactgaaaatcaccggccagcgcaatacagcgacccaacggacccgtattatcaaagtgaagcgtacttaaagggacaacaatttgcgaagtatgtcattaccaacgggaaaccaattgatacgattgccgataccgtctttaaagccttagaggataaccgtttctacattttgacccatccagaatataatccactgattgaagaccgagttaaacggatcgtgacggatggcgcaccagacgtgcacatcatggacggtatcatgtaagctaatcacgcaaacaaaggagtgttttaccatggcaagttttattgcaagtgatcaggatgttaagaactttttgacagcaccaagcatgaatgaccaggaaggtattgggtttgcttatgccactgacgaagcggtgcttaaggctttaattccagcaccattaaaattaatggcaccggtggtttgcggttatgtcgttcatatgggaaaaccgacttttagtgccccataccttgaagaaagcctatttgcgttagttagctacaaggataaaatgatgggcgcttacccgattaacctcttactccacggtcccggggcggagagtggtgtgattgcaggtcgggaaggtgctgggattcctaagaaattagcggatgacatcgaattgcgccggaatgacaacagtgcgacagccacggtcgaacgccatggcaagacattactgaacgtttcgtggacggccggtgaactgaatgatccgtcaattatgaaacaatttgcggggcagctcgcgttaggtaaggaagccgaaatgaatagtttcttctataaatatgacattgatcaacatgaagatgggacgaaccatttcagtaatgtccaattagttgcgactcaattacggtccttagctgatcaagttgaacctgggaacctaagtattcagttggagtcaaccgatgatgatccatttggcgaattgaaggtcttgaagccactcggtgccgcttggttccacttcgacacgtcagttatgttcaacacactgaagttggacgaagttgatgctgcgacaacaatgccaaagctcttaacgggtcggtatgaccggagtttcttcaatcccaaggcagcgacttacattatttaggccgattacgaaagcgaggaatagctgatgtcagaagcagtgaaaaatttggtgaacaatgatttagcagacgtgatgtttaaccgccattcagttcggcagtttgacccgaacgttaaaattggacgtgatgagttacaaaagatgattgcggaagcagccaccgcgccatcggcatgtaatttacagtcatggcactttgtcgtcgtggatacccccgaggcaaaggctaagttcaaacaagccgtgatgaaattcaactacccacaggtcgacagtgcatcggccatcgtctttattgccggtgacacccagtcgcattatgtttatcgcgatgtctggaacaaagtttatgaggatgggaatattacgaaggaacgcttggatcagattctgggaaccttcttaccattatatgaaaatgccacaccagatttcttgaaattcgatgcgacgattgattgttccgttgtcgggatgcagttgctgctagtggcacgggctcatgggtatgatgccaatgcgttctccggaattgactttgaaaagatgattccgacgctgggtcttgatcctaaacgatacgtgccagtaatggggatcgcaatcgggaaagcagcgcaagaaccgctccatacgactcggtacgatgccaaaacacagactgatttcttagcctaataggtttatgaaaagagcgggattcccgctcttttttgtccgaatacgggcctaagaaagctgagggcctttcgagtggggtggtgggttgtcagtaggcctctttacaaaagcgcttacattatttatgatgaaggcgacaagcgtgaataaggaggttacttgagtatgcaattaaagccgttattgcggcagttagccacaacgtttgaggtgactgtcgatccaacatttacacataatcccgaagttactcacgtccaatttgttgatccgacggaagtgttagcaagccaccggttatatttgtcccccgactcgggtcagctagttcaacttgcttatagttggcacggccatcgtcagtcggtcggactagtaaatctgggaaccggtctgactacgatcattgcggcacaaaatcagttattgaaattattaatgacgcttggtcagtgcttacaccacgatgttcaaattcaagcagccatcaatcagctcgctatccaagcaatcacggcggattttgataccacactggcccaagcagtacacttattagagaatccgctggcgattattgatctgaacggggagattctgacacggtcgcatacgacgcaactcaatgggactagtattcacgctgcagttgagacgaatcgagtcggacgctggctgttagaccacggatttgcaccggatacgccggattttttaacgcaagtctatgtggcggaagatcagttgtcggcggggcccatgctaattacgccgttagcaaatggcaccgagccgatcggttatttggtgatgccagcactcaataaaccactgaatgatcgacaagcactactgatcaattcgattggtcaggttatcgctggctcgttagttaaaaatcagattatgccaacagctgaatcgcaacgggaccggttattaaacttattattgacggaacatcaagggggaacgtttgctgatcagtttgctgaacaacacgtgcaattaccgacagccatggtgttaatccgctgcgaaccactagctgatcaagcaccgatgattttacagcagcgactacagtacttgatgatgccacgattcaaacaagtgttggtttcgacttatcagcaacaatgtgtggcactgatcccaattagtctggtcgcatataatcagaatcaatttaaactaacgttgcagcaaattacgaagcaagcggattgccgcttgatcgtgtctcagcactacgttaatccggaagatacctttgccgcgtatacagtttgtgaacgaacggcgcaactgaagactggccgtggtcgggtgattttttgtgaagaccaattctataatcttgcgttggcacgagttaatcatcttgagatcttaccgttctttattaatccagccctacgtttgttgttagcctatgatcagcaaaaccatacagaactggtaccaacattagatgtctacttacgggcgacttgtaatttgacccgcacggctaagcaattatacgttcatccaaatacactgcgtaatcgactgcaccatatcacaacactgaccggatgcgatttacgggatgcggaaacgtgctttaaattggctgctagttttaaattacggcaatttttaacccagcatcagtaccagtatcgaccggatattccaattccgacccaagattaagtgggcataaaagcgtgcaaccgtttgtggaaaaatggttggatcagtcattattagtaaatccgtaaattcaggatggacggcaataatggggccgccattgcgatttgatcggcgggcaggcatgtgattagcaacagtcgtcattaaaattgttatgcaaccggttgcattgaaactgaaagcgttttataatgttaagtgaacattaacggtgtgcttcaaaacaagacgggtagccgtcactcttggcgcatctattgatgattgcgcagttgtccggtacccagcaatcaattgtgctggtaattaacgaggaggaaccattaatgagtaaatttgcagatattaaagggtttgtatttgatttagatggcgtgattgcggatacgtccgtttatcactcacaagcttggcatcaattagctgacgagttgggcgttgcctggagtgaagaacttgccgataatttaaagggtgttagtcgaatggactcgttgaacttaatcttaaaaacgggtggtaaggaaaacgactatacggaagctgaaaaagtggcttacgcagccaagaaaaatactaattatctgaacctgttgaagggaatggataaaactgcaattttacctggtatcgaagacttcttagccgatctcgccaagcatgggtatcgtttatccttggcctcagcttctaagaattcaccattggttctggaacagttaggcttggcgcattactttgaagcccgggtggatcccgcaaccttgaaacacggtaagccagatccagagatcttcgcacgtggcgcggaagtgcttggcttgaagcctgaagaatgtgcgggcgttgaagatgctaaggtcggtattcagtcaattaatggtgctggtgaaacgtcgattgggattggtgatcctgccattttgacgggtgcggatgttaacttcacttcaacgagcgaattaaccttagctaatctaaaagccgcgttagcctaagtttaaataatacgaaaagcttacttcacaaagtcaactagatttgtgatgcaagcttttttgagttactgcttttctgaaagtcttaatgggccgctggcaaggtggcaacatcgggagttagtaactggacgtgtggggtgcgactaaggacgtattctaacggaacggtctgtttttctaataaatgatccgttaagttaacttgctgaatcactcccggattttcgtacagatctagtgcgtacgtttgatgattcaagtccatgtagctacggtactcagtataggttgcttggccgttggcggctactttggcgcccttgggaatagtcacagcattcaagatgtgttgaagtaagttgactgtatctgttgttgtcgctggcactagcgcatagtgtttcaagaagacggtccgtgcaaagcgagacatcgaagtatagtcaccaggtagacctaatgcgcccgtaccaggtccctgtgaaccaggttggtagttaatgaatttatttagtggccgctcggtgttagtcagggtgccatacttacttaagttttgtagctgccatttgaggttcggtgaattggtcaggacgccgactgggttattaatcaggcgaagctcgccactagttggttccaagacggcggtttcaccggtttggtcactaatgataaagtgaagtggtggaatttcgttaattaattctgccgtgctactaatcaattgaacgtctttgacgcgctcacgtaggtcagcaacactagtgatttttccgagtacccaggcgacgaaatcgtggggtgcgagatcgattttgtcttggttactgtgaggctggtaaattgcatgattcggaaagtagagtgctgcgatgctgacaccacattcgttaacgccgtccgtgaaaatttcatggttcagttggcgacccgcgccaataaagccataagtcgtggtgaaatcaccaaggtcacccgtcacgcggtaatgtcgaggcatgaacataatacgggtctcaaagtcaacgttaaaatccattgtacgagctaagaagtggcctccatgactatttgtataagttagactagtgcacatacaaatcgctcctttattagatgatatcggtaacttatcatatgattgcggatagcggcgaaaattgtgacgcttaaattaacgaatggtaatcaagtttacttttgagggggtagttcaattaacaagctggggaaactcatcatgaggctaatgtttcacgtgaaacattatgcttttaaaatgacaaaatcgctatcataaatgatgttagtagcctaaaataagggggaaagctactaacataatgaacgatctaagacggaggaagaaatgaataaagagcgtaagtcggtgatgccgctatcacaacgacatcatatgacaattccatggaaggactttatccgtaatgaagatgttcccgctaagcatgctagcttacaagagcgaacatcaattgttggtcgagttggcattttaatgttgtcgtgtgggacgggagcgtggcgggttcgtgatgcgatgaataagattgctcgcagcctgaatttaacgtgctcggcagatatcgggttgatttcgattcagtacacgtgttttcatcatgaacgtagttatacgcaagtattatcgataccaaatactggtgtaaatacggataaactaaatattcttgaacagtttgtcaaagactttgatgcgaaatatgcacggttaacggtggcacaagtgcatgcagcaattgatgaagttcagacgcgtcctaaacagtattcgccactggttcttgggttggcagctggcttagcctgtagtggatttatcttcttacttggtgggggtattcccgagatgatttgttcctttttgggcgcgggtcttggtaactatgttcgggcgctgatgggtaaacggtcgatgacgacggttgccgggattgcggtcagcgttgcggtagcgtgtttggcttatatggttagttttaagatttttgaatataatttccaaattcttgcccagcatgaggcggggtatattggtgccatgttattcgtgattccgggttttccgttcattacgagtatgttggatatctctaagttggatatgcgctcaggactggagcgcttagcttacgcgattatggttaccctgattgcaactctcgtcggctggctagtcgcgacactggtgagcttcaagccagctgatttcttaccgctaggactttcaccgttagcggtacttttattacgattaccagctagtttttgcggtgtttacgggttctcaataatgtttaatagctcgcaaaaaatggccattaccgcgggatttattggggccattgcgaatacattgcgccttgaactagttgacttgacagcaatgccaccggccgcggccgccttttgtggggcgctcgttgccggcttgatcgcatcggtggttaatcgttataacggctatccccggatttcattgacggtaccttcaatcgtaattatggttccgggattatatatttatcgtgcaatttatagtattggcaataatcaaattggtgtcggttcactatggctgacgaaggccgtgttaatcatcatgtttttaccgctcgggctatttgtagcgcgtgcgttgttggatcacgaatggcgacactttgattaattgagtctatcaagttagcggttaaaaagtcatttagtcaccagatcagttaggtctggtgactaaatgactttttaaatggcctttgactgaaaatttaacggtgacagtttacaattaagttatcaatctagctgggggcttggtcatggaagggattactaatttacggtcactaggtggttatcgcaataaaaatcagcaagtaatcaaagatggtttaatttaccggtcaggacaattggatcaattaacaccggcacagacgcagtatctagcaaccacgcttggcattacgcgaatcgtggacatgcgtagtgctgatgagcgtcatcaatttccagatgcgacatggccacacgtccagtatcacgtgctggatgtgctagcacaagtcatgacgaacgacgcaagtttacaatcgatgattagtagtacgggggcggtccatgaccgcatggttcagttatatgaacagctagtgttagatcctactgcccgtcaaagttattgtcaatttatacagctactactggttccagatcagccactactgttccattgttttgccggtaaggatcgcaccggcgtcggggccgccttatttctaaaaattttgggtattagtgacgagcaaatcatggctgactatctgctcacaaatcaagcacgtgcggctgctaatcaacaaatcttggcgacgatggcgtcgcaattatctgatgagcaacaacgggccgtgaaccaggcattattagtagacgctgattacctgagccattactttgaagtcatcaaagcccggtacgacacattttcaaattacttgcagacgggtctagggctgacctcagcggaatgtcaacagttacgcgaattatatttgactaaatagtcaataatataaaggcgcaaaaaatcacaccaatactcacttaaggactaacctgggtattggtgtgattacttattcatgggtgtttgcgttgtccgctgacaatagtcggtcaatcatctgattgccagcctgtaaatcggcgcgttgataatgttgggcacgaatacgcattggatcaccaccatgatagtattcgtacatcaattggcgctgaccaaagccagaacttgttaaatcgaaggctaagttcaacaagcgcgtgcgggttttagcggtggctcggtccgtcgtgagtgcctggttgaggattgtcgcattatcgccgtcaaattccgcaaaacttggcacgccaaccatggaaccggccgctaagtgttgagtcacgcgcaaggcctcgtcatagtattcgggaagggtcgagcgaaccgcttgcaaagcttggagactgggcgtatagataccgaattcgtccagatgaccgttgtcttctgaacgggtgatggtacccttgatgagttccagattagcggttaaccgaccgagtttttcttggacacctaagaaaccatctaatcctaagatatgagcaatccgaagcgctaaactggttgctaactcaagcttagtaatacctcgaacctcatcttgatgggaagtgtggctaaacatgcctgaatcgatgaagaaacgattactcatttcaacattattttcaacaaatacttttgaccacggaataaaggcgtgatcaaagacaatgtaggcgtcaatctcatcaagggcgttgctgagtgggtaatccgtaatggaagcggtgggatgatctaataatttgcgacaaatgatcttgacgcccggattattgagtggcgtagcaaaggcgacagcataactactatcgccgttttctaacaacagttccggcggattaaaaatcaggaggtcatcagcaattggggccatcgtattgaccattttggcaccagaaacgaagattccatcttgattacgttcaatggtatgaacacccgcgtatccagacggaatggcattgatggctttttgacggttgagttgtgggttttgaagcgcatggctaatgaagatatcgttagctttgacctccttagcgtaattgcgggcattagctgcaaaatcagtatattgattttgcccgaggaaggcagcgcgttctgctaagacggccatcccagtattaagaaaatccggtgtgcggcctaacatgccgctgttactttgcgcaatttcttgataagcacggtgcttttgttgtaaatcagcgacggtgcgtggcactttgaaagcaatatcgtagcggtgaccattttcctgataagtatgtacttcgggatggttgtgttgcaggtcatagtactgattattgagtgctaaagttttacgaaaaatgggcacatcggcgacattgacgcggtgaccatttagatagaccgcgcgcccgtcattgagttgttcgatagtatgcatgtgtcgttccccctaatgaaagttctattccaatataccactaatggaagcgaattcaccagtgctgattggaacgctatttttagtgaacgggataaacgacgtggaagcgttccagaaccatttgtgcagtatggggatcaaagcgctgatgctcgctttggtactcctgcttgaagaaggcatcatgaacacggcgccaataggcataagtacgatcgccttcaccttctaagtaagcgtgggttgcatcgatgtccaagtaaggcgtaatcatgacttgatcggtccgggtcacacagacaggctgattatgagcatctaagatgacgtcataagcgcccacttttggcagtggttcatcagtttcgtataggtcataagcgctggtggtagccgtttttgtgccagttagtacgagctgtgcaagtttatcaggatcgctgccaaactgataagcactttgtaatggggtactttgtgtcaatttgagcgtcgttttagcttgttcgaaaaaagattggacgtccattattatcacctctaaattatgatcggttttaagtttaacataagcgcccatggctcaagtaattagcgtggtataatgactctatcttgggtaattgcaggcgatacccagaccaaacattgccgttgtggaaaggactaatcatgcgaattaatgtgttgcaacatacccccaatgagggccctggaatgattgctgattgggcgcatgcccatggtcataccatgtatgtctatcacccgtatcaattcggtgttctcccaacggcggatgagacggagatgcttgttatcctcggcggaccgatgagtcccaacgatacgctgccatggatcaagcaggaacgagacttgattcaacaattattggaccgcgatatcccaatgtttggtgcgtgttacggcgcgcaacaaattgcgaagaccttaggatacccagtcactaaggcgccagctaaggaagtaggttgggcaccgatttaccgacagagtcccgtgattccggggattccagcaaaactgtcggtcttgcattggcacgaggagatgttcaccgttccagccgaagcaacgctgttgttctctagtgatcgtgtgaccaatcagggtttcgtatggaagcatcgggtagtggggttacaatttcactttgagccggctgcggacaatgttcgtgagatggtcgtcaatgattatcggtatattgcggggtcggtcctaaaccaaacagcagcagaaattttacaaacgccggtaccacgagagaatcaacaagttctgaatgcaattttgaattatattacggctgaataaagcagttaagaagagaataatcaggttagtaaaaatgtcggtagtccttgacggggctaccgacatttttgttcagaaaaccaaacgttaatagaaatcttgaatttgctgcagttcttgcagataggcagtttttaacgcttccggataaataattctaacgttgcggccaagtcccagtaaatagtcgaccatataggctaattcatcttgattataaccaccaatgagataatcttggtcgttctgatgtgttaagtgcatattaggataattattcttttgtacatgttcacggcctagaggtgttagtgcacatttataacgtatattgtgatgatggtgatcgtaggaccgttgccgttgcgcgagctgtttccaagtataccgagctggttgctcactggtttgaaatgctttgatcgtatcacagcgatagatgccccaagcattgttatcgagattgacgccactgaaaaaccaaatgccatgccgatataataaatcaaaaatctgaaacccagctgtcacagtagtcatcgttaactggacaacattttcatcaaggatagccgttaataaatcacttaaatgggttggggcatccaagttaggaattgagtagtagttaaccacacgttgcaatttggcgacctggcgctggttgcttaaagatagtgttgccatgagttttttgtaaattgtatggtaggacttttcaaagggggtcgccgacaataaactgagtgctttgagcgcaaaaaagagcgcattaatttcctggctgtttaataagatgggtacccatagttgttgttgcatgatttggtagccaccgtaacgtcccggttcaacgtaaatggacaaaccaagttgttctaacgagttaacgtcgcgcaaggcggtccgtttggagatattgaattcttgcatgagttctttgatgtggaattcttgtcggtaactgagaaagatcaattcttgattaagacgttcagagcggttcatataaataactcctaaaaatgattttaatggtgacatggattggcacctttcgactgtagtatataactgttgtcaaaaacaaccaataaatagattattaattaaggagatatttaaatgactaagactttgattgttaatgcacatcccgattttcgtaatgcggcgcactactcagttcaactagaacaagcttttttgcaactttttcagactcgctttcctaatgatactgtggatgtgatcaatttgtatgatacggtgattccccaagcaacggtacctgaattgctgggaatctgggaaaagcaagcgcaacatgtaaatttatcgattgaggaacaacgcctgtttgcaatcaagcagcaactcctacaacagtttaaagctcatcatcggattgtgattgcgatgccgttgcataatttcaacgtgccggcacggttaaaggactatatcgataatatcttagttgccagggagacttttcgttataccgaaaatggatcagtgggtttgatgaccgataattatcgtgtcatgttactgcaggccagtgggtcaatctatactcgtaatgaccgttatacacccatggaattttctcggctgtatcttgacaagatgtttactgaaattatggggtttgatcggtttgagattgtccgtgcacaaggactgcaaacgaacggggtggcggtatcacaggcattaaagcaagctaaaatggacctgaaggcagcttttgagcgtttttatgattaagtctgaaaatgattttaaggtatcggtagttgtaggctacggataccttttttgcgatactgcacgggaaatgggtcaccactactttaaagtgatcgcaactatggaaagtaactagcctgattttggtgattaacattggactaaaacacgccaaaatttatgcatatttaacgttagtggcagacctttactagccgttcagtgctgagaaccggtatactggaagcagtgattcactaatcgtgaagggagcccaatatgaaacggattgtagcgggaattattgcccacgtcgatgccggtaaaacgacgctgtcagaagcattactataccggtctggcgcgctacggcaattagggcgcgtcgataatggcgatgcttttttagatacggatgtgcttgaaaaacagcgtggtattacgattttttcacaccaagctaatttacaatataaagacattaatttaacactcttggataccccgggccacgtcgattttgcgacccagactgaacaagtactgtcggttttggacgtcgcaattttagtcgtttcagcgactgatggtgtgcaggggtacacgcggacgttatggcgattattagcccgttatgacgttcctaccattctgtttgtaaataagatggatgcgccggggacggatagcgaccaattgatacaacaaattcaacagacattatcgcctggttgtgtggcgtttaacacgccgggagccggggacacgttggaagatcggccagtcataccgactgcggcagttgaagatattgcgatgcaaaatgacgaagtgttaacggattacttagaacctgtttaaaatctagctaatttggtatgatagttcaaaaaaggtgatcagtaatgaattatcccagtaatatttctcgccgacaatttgaactagtccgtcccattttagaaggtgcacgacagtcaaccagaccacggaaatatgatctttacgacttattttgcgcggtggcctatgttttaaaaaccggctgtcagtggcggcagttaccagttgattttcctcgttggcaatcggtttattattattatcgagtatggtctgaagaacaagtccttgatgaaccttctattttggatcaatgcttaaaaaaattgtctttaccctacgggaaaaacagtcacgctcggctaaaacatcttttataataattgacgcccaaagtgttaaaaatactgataccgccaagcatcatggttacgacggtggtaaacgaatatctggaataaaacgtcacttagctgttgatattaacggtttgccacaagcaatccatatcactactgccaatgtttctgaccgtgatggggctagtgccatgctagcgctaaactgtgaacatttacaacaagttaaatcagttcttgttgatggtgggtacaccggggacaacttcgccgccactgttcaatccaatttaaaagccaccgtacaggtggctaaacgcaatgagctacataaatttgaagtgttaccacaacgctggattattgagcgttctttcagttggttagataaatgtcgtcggctctggaaaaattgtgagcggcaccttaattcaagtcgccaaatgatcattctcgctttcttgatattactcttaaaaagattttaaacagattcttagaaacagggacgttaagtgatgccacgattcggcagatgattcaacggcgggaagtttttccgtgttattttggcgcggcacttaagctggacggggttgatgcgctaatggctggtcttgattattggacgacgccacaattaacgcgtcctgaatttggcgcgcgggtgttcaagattacgcatgatgatcaaggtgaacggcttacttggattcggatgaccggtggcaccttacgacctaaagatatcgtgtatgatgaccaaaaagtcaatcagttacgggtttacaacgggactaagtatgcgaccacgtccgcgctgacggcaggatccgttggtgccattaccggtctaacgggaacgcggccggggcaaggattgggacaggcagcaactagtctacaacccgtcatgcagcccgtactgacttacgcacttgatcctcagcgtgaggagttacacacctgcttagcagtcttgcgtcaacttgaagatgaggatccacaattacacgtgacttggtcagaaccacttcaggaattgcgagtacaggtcatgggaacgattcaactggaagttttgcaacaaatcttgcaggatcgttttcaactgactgtaaagtttggaacggggagtatcttgtatcaagagacgattacccaagctgttgaaggtgttgggcattttgaaccgttacgacactacgcggaagtacatttgttgctgacgcccgcaccgcggggaagtgggcttcaatttacgaccgattgttcattggaagtgcttggccgaaattggcaacaccaagtcgtgtcaaacctacaagccaaaacacaagcgggtgtcctgattggcgcaccactaacggatgttaaggtaacactggttagtggtcgggctagcaatgttcattcggttggtggtgactttcgtgaagcgacgtggcgcgcgttgcgtcaaggcttgatgatgttaaaacaacgtggtgattgtcagttgttggagccgtggtatcggttccgtctagaagttggtcaggaacaagttggccgggcgatgactgatattcagcggatgaatggtcagtttgacgcaccagtcgctaatacaagcgtagccacggacgggactgacttgacgacaattacgggaacggcgccagtagcagcgatgcaggactattcacagacggttcgagcttacacgcatgggcaggggcaattggaatgtatcgtggatggctatcggccgtgtcataacgagatggctgttgtcgataaggccaaatatgtccccacagcagatttagaaaatacaccggactcggtcttttgcgcacatggtgcgggttatccggtagcttggaatcaagtgccagagatggcgcacgtcccgtacgtttattcgaatacggaattggcacattttaaggcgccatcaaaatagaaattgaggaaagtcagatgatggatgtgacgtttaattcgacgttcgcggtaaccttgcaacatgagttgcaccagccagtattgagtttgccattgtcgttacaaatcggtgatttaactcgattgacaactgatgatccagcacagcttgctatcatgtcacacagtaccgatgccacggttgtcaagcaagcgttggtaatattaaagtctcaagttgagcaggggggcgtgctacgagtatggtggtctaccatgcccgatgattcgactggttgtgtcagcagttagcagacacagacgcgcaattgagacaagtgatggtaccgctaagtcaagtgataactcggccaggtctagctttacagactttgtcggatttatcggaagtattgccagcggatattgcgcattacttacagttggcacaagacgtttctgaggacgaacagcgtgctcatagttatgaatggcaagcgctcgtggtagaaaatgagccgttacgggtcaatcttaacgggcacttagtcagtgccccagaggacttttatgacagcttgttagaacgccaaatacaaccgggacgcccaattgtgcaaattattggtgagatgctgatgcgctactcactgggcttgccagactggtggtatcgtgcccggctccaacatatcttgtcaacgagaggatgattaatgtgaagaaaattgcgcccctgttcgttggcttaggggccattagttttggaattccggcgtcactatttaaaattgcgcgtcggcagggggttgtcaatggcccattgctattctggtcctttctgagtgcggttgtgattttaggtgtgattcaaattttacgccgtgcacgtttgcgtaatcagcaaacgaattggaagcaaatcggactggtaatttcggctggaacggcttcgggatttactaacaccttttacatacaggcgttaaagcttatcccagttgctgtggccgcggtaatgttgatgcaggcggtctggttatcaacattactaggagcagtgattcatcatcggcgtccctcccgactgcaagtggttagcattattttggtattgataggcacgattttagctgctggcctgtttccaattacgcaggcgctctcgccgtggggcttgatattaagttttttagcggcatgctcgtatgcttgcacgatgcagtttacggctagcttaggcaataacttagacccgttatcgaaaacatggttactgtgtttgggcgctttcatactcattgctatcgtgtggtcaccgcaattagttacggcacccaccacgccagcaacagtcggctggggagtactgattgcactattctcaatggttttcccactggttatgtattcattgtttatgccgtacttagagcttggcattggcccaatcctttcttctttagaattaccagcctcgattgttgttgcatttgtactgcttgatgaaactattgattgggtgcaaatggttggcgtggtcattattattacggccgtaattctgccaaacgtgttaaatatgcgacgagttcggccatagttcaggtcaataccaaactcaaaatgaacatgttgtactggattcatttttgtactgtgttttttgtttcacgtgaaacattcatctaattgatgctctttatgaatagttggtgggtaccttatttatataaatgataaaatgtgcctcacttagggacaacttgaattgaaaggtggtcaggctgatggcactaacctatcggatcgtccgcgctgaagcagacagtgattttggaaaaattcgacagttatattatgagacctggcaatcagcatatcgtgatttgatgcctgcaagttatttacagcaattgacgccagcaacttggcggccggaacggcggtggcaaaatatgttgctggcaatgacggctgatggtgaagttgtgggtgtttgcacatttggtccggccagacatgcgaactatgaggggtggggcgaactgtattcgctatatgttcacccgaactatcatcatcatggcattggtcagcaattaataatccaggcccaccgtcgcttaaaggcggtctatccacagaattatctacttgttctggcaaacaatgctgtggcccagcgtttttatcaacgtaatggatttcacgacactggtcagatttatgtcgatcatgcgccgtttggtgttttgcatgagcggatttttgaagattaacgcaaaaaaacgagccttgtgctcgtttttttatagtttagcaatcaattggcgtgcgaccgcgcgtgctgagaacggattttgaccagtgatcaattggccgtcagtaattgcatattcgcgataaaatcgatgctgactaaagatagcaccgtgagcagtagctcgttcacggttaaggaacgggacgatccgttttttgccggcaatcagctcttcagttgcggtaaagcccgtaatggttttgccagcaatcaagtattggcccgtttggtctttgatgtttaggaggccagcaattccgtgacaaacggaggtcacatatccaccatgttgataaatggccagtgcgatggcttgtaactcagggttgtccggaaagtcccacatcacaccgtggcccccggtatagtaaatagcagtgtaatcatcgggatcgacctgactaggcttgagcgtgttcttaagggcccgattaatgaagtcagaatcttcatacacggccattgtggcggcatcggtatatttcatactacgcgggtcaaggggcacgaagccaccattaggactaacatagtcaacggcaatttgggcttgctgcatttcatcgacgaactcagcggcttcacctaaccaaagaccagtcggctcattagttccttggtaacgagtgatattggtttcgacaattaaaacttttttcattgatcatgactccttaaaaagattgatttgaagttagctaattaggttgaatactgataatgattttaccggtagcatgaccggaatgcgagtattctaacgcgtcgttgatgtcggtgagggggataatccgatcaataactggcttaataacgtcctgttcaattagttgtcgcaggcgtacaagttgctggccactaggttgcatgaacagaaacgaataggtagcttgggcttgttgttccagttgactcagtttccgcgttgctagacccaataaccattgtttccatattggcagtccgtaatccttaccaaaacgcgcgtttggcagtccggcaatgctgacaatctgaccgcctggtttgataatctgaaaagcggcctcgagggattgcccgccacgagtatctaatacggcatcgtaatgggataatacatcagtaaagtcttgctgatgatagtcaatgattttatcagcacctagtgattgaacgaggtcaaaatgtttcgcactggtagtggttgcgacgtaagcgccgagatatttggccagttgaatggcaataatcccaataccacccgaaccgccgggaatgaaaaccttctgtcccggctggatgttcattatatcgtgtagtgcttggtaactggttaaacctactaatggaattgcagcggcttcttcaaaattgagattggctggtttcagtgcgatggcttgatgatcaatggcgataaattcagcaaaggttccaattcgatctttgggtgcgcgaccgtaaacagcatcaccaactttaaagcccggtacttggtcgccaacggcagtaattacaccggcaaagtcactgcccataattagtggcatggtgtattgtagtaacaatcttagatcgccatctttggttttcaaatcgattgggttgacactggcggcaacgattttgacgagaacatcggtgggagctattgtcggaacagggacttctgtcaccatgggggttatttgcttgtatttagtaataatggcagctttcatagtggactcctaacatattggtttaaatgtttaacatcttgaacaaaccatgctgttgattctagtcgcttacttacaaaaagtcaacgattaattcttgactttcaattttagcaagcgttaaatggtttaagaatacgaaccgtaattggaaaggtgtgattttttggcagaacgaacgatggcaatatttaagaagggtgttccgatttttacaattcttcaagacgaaaatcggcaacggattttggtgatgctgtgccggactgatcagatgacggttaaccaaattacagcgcaaatcgccttatcacggccggccgtatcgcaccatttgaagttgatgctggatgccggcattttagcggttagcaaaacaggtactgaacgttattaccgcgctaacatgacggcgactctaaaactattgaaggcactcactgcgtcattagaagccgatttagcccatactcagtctgtagacgaataaaaaaatgaatcagagtgaaaaaagctggtacttttggaatgacgcctctcattccaaaagtaccagcttttagttcacttatgcatttcagcgcactgaatcaccagtacttgaaatggatggcgccatttaatgattatcagtgagctaacgacatgatatcgttattattaatttgaggatggcacttgaatatctttgaaggtgtgccgataaagtaaccagccaagtaagcacgttaagacatcagcgaccgcttgagcccaaataataccagttagtccaaagaactgtgccagaataacgatggcgatacctagtaagattgcttgccgcgaaagagccatggctagggcactcaaacccgcaccgactgattgaaagacggtcgtgaacacgaggatgaaacccactaatggtgtcgtaatcaacatcgctcgcaacatctgtgtacccatagtgacaatggctggttgattcataaatagtttaataagttgaggcgcaaaaatcattagaataatcgcacaaatggttgcgtagccaccctcgacttttaaatcgaagcgcaacgttgcccgtagtctttgccaatttttagcaccgtacgtgtaaccaactaaaggctgggccccaaaagcaaagccgaccatgaccatcataacgaccatgtaaactttttgaacgattcccatggccgccacggcttgggcgccgtatgcggctaagtagctgtttaagatcatcatgccaaaactctgggttaggttagtcagtgaggctgggattccaactgcgacaacggctttaagggtcggtcgcgagatatgggctaactttggtgctaaggaaagcgttttggctcggcgcataaaaaagactaacagactggtgttgaccgcgtaccccaaaacgttggcaaaagcaacgcccgaagcaccccagtgaaagccaaataagaataagggatcgagaataatggtcagaaccgtcccactgatggtcgcaatcatggaaagttgtgccaggccctccgttcggataatgttaccgggaaccagtgaaacgatgataaaggttgatcctaataccaatatacgatagaagtccgcaatgtagggacgggtagctgcagtagcacctagcaagcctaaaattggttgttcgaatagtaataataaggctgtcagtactaagctaagcgcgatcgcaatgtaaaaacaaaagctactgatacgtgcactttggtgataatcatgacggccaaggactcttgaaataacggcactcccaccgaggccaaaaatatcaccaactgctaacataaacgaaaatagcggactgccgagggcaataccagcaactaaatcagcattaccagtttgagcaacaaaaaatgtatctgctaagttataaatcatgctggcaaccatgccaagaaccacaggaaaggctaaatggaaatacgctttgggaatcggggccttctcaaataaatcattcataaaaataagtcactccttctctgaacggtcggtcgaagcgtgactagacgaacagaaagataatataagttaatgatacgcttgactgtcaagctgctcaatgcaccaaactgataaggacggtcagctaaaggaacgacaaaaaaagcattgcccagtgtttcagcggcaatgctaaaaattaacgtgaatttttaagagattaacgtaagtcgatttggtgaaggttagccggcatctgaccaacatgatggccgaccgttcctgcgtgcatcgcttgtgcgccattgataaagtgcacaccagtggctgcaattaatcccattcctaatactgtaataatacttaataccatcattattcacccgtttctgattatttctgcacttctattgtagcgcttacatcaccattgtcatttgagttgtattagaatggaattaagtttttcactttttcaggtggacattagtattggaatggaataagtacgcattgtgcgagttaatttgtcatcgattatgattaaaacgtgccattttttaaattcaaaagcagccagcttaggttcgctgggaacagttcgagttagcgtaaacttgcttagagtgcgcgtcctacaccgacctccaggcatttctgccaattgccggaacgtggtgggcacagatttgagccgaaaacccacgtctcaaatactggcctttcactaaccaagcacaggacgcttgctaagtgaaatttcaccactgggcattgtcagaaacgccttccagtcgggacagtattcgaatggcagacagtaagggacctaacttttgttggactcatcattgttcttcataaacagcaattttgtcgagcagctgtcaggtagaaaatgacattgtgatagctcactatttcggaatcgccatagtaataatcgaacgtctcaacaaagtggttaatgtaaccctaacgtttcttttaaggttccatcatcaaaatagtcagcgaccaattgtaccaagttaagtggctgttcatcagccattcgagcggcttaccgactggaggagctgggtgacaatgctcagtagccaaattattcttagtcggaagtgggttgcttccggcttagaataagactcgtatttgagactgggcgggttgtgcacgggctctaatcgacgtcggcttacgttccagcaattgtcacccagccccggaggtcggaatcggacgcgcattgctgacgaacaggaatccatctgtttggcacgttttaatcaaggctaatgctaaatagcggctagcataacgcataacgcataacgcgtaacaagtaaaaaattagtaacgaaagtgagtgatattttggacgtgcaagaaggatacatgccatttaatggttatcagacgtattatcgaatcgtaggggatcggcaatcaaataagacaccgttagttttgctacatggtggtccaggatcaacgcataattactttgaaggatttgatgacctggccgttcaaacgggacgaccaatcgtcatgtatgatcaattaggctgtgggcgttcatcgatacctgatgacgatcaattatggcaagccgcaacgtgggtggcagagttacaggcgttacgtacgtatttagacttacccgagattcacttactagggcagtcctggggtggtatgctagctattatttatggttgtgactatcgaccacaggggattaaaagtttgattttagccagtaccttgtcttcagcccgactgtgggctcaggaacagcatcggatgattcggttaatgtccccagcggatcagtcggctattgcgacagcagaacggttacaggatttcacaggtgctgcctacctgactgctaatcaacattttatgacgcaacatgcgtcgggcccgattactgctgatgatcctgaattcctacggcgatcaaaacgggtggggaccacggcttataatgtagcgtggggtcccaatgaatataatccgactggtacgttggcggattatgagtataccgaccgattacagtatttgcagatgccaactttagtcaccagtggaacggatgatttgtgtacgccattagtcgctaagaccatggtcgaccagttacctcatgcgacttggacgttatttccccgtagccgtcacatggcgtttatcgatgaaaacacgacctatatgacgcgattgcgtcactggctagcagcccatgattagagaaatgagcgtaatcatttcccgggaaataatttgctgaatagctagattgagaagtttatcggcgtgatctgattttgtttggctgtcactataatgattattaaaaggtttaaagtagaccaaagcgcctgtggaagttagccttctgcgggcgctttggtgattgctgtgatgatgtttaatgttgatagataaagacgaatcgattggccgtcgagcgcttctcgtcaaattgataatcgggatggtcaaatgtgcgaatggccgtcacatcatcgatttgatgttcagccaaaaaacggaccatggccccacgtgccatcttagctaatgtggctttagtcttgagtttgccgtcgataaggcttgcaaagacaatatcaatcattgattgatgcggagccagataaggtgcaatggtcttagcatattcttgagaagcaagattgataattggttctggccgcggagtcagtgcctgatagaggcggtcgccccaaaacgcatagaggttcttggcttgaccaacagccaaccgtgcttgcatttctaaccgataaggaacgataccatcaaacggtcggagaatgccataaaaacctgacaagattcgtaagtttgcctgaatatagtcaagggctggttgggtaaagacgtccggggccatgtaacggtactgaataccgctgtaactgagaatagcgggagtcagattgcgggtcaggtcaattttttgaagccaatcataattaggttgggctagtttgtcactgcaatgccataaggtcttggcctcaggataggtgaggtgttgcagttgagccagtaattgttgcgtctgatcaagatagattggttcagttagggctggaaaggcatcttggtcgataatcatttttttcgcaggtgcaatgatgattttcataaggtcactactttcgaagcgttcagtttataaataatgttgatagcatttaaagcaaaaactaagctatagaaatatgatagcacattagacaaacgtacgttcctaaaactatcaattgcggtataatgaaattatgatactaattgagtaaaaggagtttgtcggtatggatatttcactattaaaacaagtggttcaatcaactaataagattgccctcagcacggccgtcaataatgaagcagatgttaaaattgttaactttgtctggtacgaagcacaaccagatacgctatacttctcatcagttaagacaagtcccgctttgaaggtttatgaccagaatccggatattgcattcattacgattcctaatgatggaacagcgggcaatccatatctacgagcccaacacgttaagttacaacggtcaactaagacgatgactgacttgctaccccaatatttagaaacagttccgaattatcaacaagtctgggatgctattggatcgacactcgttgtttttgaattaaaactaactgatctttttgttgacgcgggtgttggtggcgagaagcaaacactgacttttaattaacactggattcctatactaaaagcgtttcaaggccggcttaggttaagctacggtcttgaaacgctttttggtcgggtaattttaggagcaacatatgaggtgttacttcacatatgcggtccgataattggcggcaccgctgaaattattatagatgacgccctttaagtgcgacttaacgagcagatgggaacggccttcatagagtggggtcacggcctgatcagttagcgccgttttagcggcttgaactaagtcttgatagcgcttggtcgcgttcaaagcatctggaccatcagcggcttgcattgcctggtcgtaagccttgctttgatagtggcccatgttggagttgctgtcgccagtcaaaattgttaatgattgtgaagggtcggcaaaatccatactccagctagttaaattaagctggaaggctcccttggacactttacctagcattgcggtaaatggcattgccttgattgttacctttagtccggggaggtgactggtcaattgtccctggatgaattcagcgacctgatgtgagttgtcatcatcaccacaagtaatcgttaacgttagcgattttttgcccaattgttgttgtgctttatgataagcggctcgagcctggttgagattataattaacagtaccatcaacggtcgcatcattgacaaaatcggtaccagttttaggattcttagccatattgcgcacaccaaagcttttggctggaagcgaaccattttctagaactttgttggtcagttgcgaccggttgattgctaaggataaagcggtgcggagttcacggttggctgctacatggtcatggtgattgtattgaataaagctgatttgaccacctgcaagtgttttgagttcttgattatttttattctggacactctgctcgccattaagtgtcacactatctaacttattagattgatataaattataggcagtcgtattggacttaataacctgataattgatttggtgcagtttcaccagtttgtgatcgtaataagctgaatttttctttaaggtccacgtattattagtcccggtccagccagtaagcgtaaatggcccgttgtagacggtcgtcgcggctgaagtcccgtacttcttcccgtatttgttaacagcaggttgattgaccggataaaaggtcgaaacagctaaaatctttttaaagtaggcgacgggtttgcttaacgtgattgttaattgatagtcaccattagctttgacaccaagggttgatggctttttcttgccggctgcaatggcgtcagcatttttaatgttcgtgaagacataggtgaattcagatttactttttggatcaagagttcgtctccatgaatagacaaaatcgtgagcggtcaccctgttaccgttactccagcgcgcatcgtggcgtaattgaatgatataggtatgaccaccattggtaacagttgtcttagtagccaaagcgttgacgggttggctctgactgttcagccgatagagcccctcgtcaacttgggtgacttggctattagaaacgctgtccgtcattttagcgggatctaagctcataatttctgagccagctgataggttgataacttgtgattgtttagtcgtagctgggtgtgagtgggcgttgacggtaaagccgatgccgccaataatgaccacgctgccgattgttaaaattaatttgtgtgttccggataaactcataattaaatcctccaaaagtataattgtatttggttagtttgatccatgagttttgccatcgtttcgtgaccatttatttcaccccgtttttatcgtcaaaaaaaccgtccttatccagccaatgctgtgttaaggacggtttgataaccgcggtgccaccttaattgagtgttcgccaatttagtgattaaatcacgcgtacactcctactccataggaaactaacatttccctgacaactgacgtatgtcgcacgtctttccgtactctcaactgacgttaatttcggcaaagccctcggtggtccatttaattacctgcgttcggccatactctcagcaacgatgactctctgtgcgggcacgataatcttgatctccacctcattggtttataaggacgatattttgttgaagtgagtataccgcttttgaaaattagttgtcaagagctggaaaaatattgttcaactataaatttagtcaaacagaaaacgatgttcgtaaataaaccgaggattaatatagtgtcgagtggcattgattgcgtggtttttaataacggctgcaagcattaattactttcattatgcgcgaataaaaattataatgacatcaataatgtaaacggattcaatattgcggtgacaagattaaggagggctaaacatgagctttagagttgtagccggttatttcggtgaatttagtgatgaagcgaagcgggccaatcaagacttaggtgtaatcggcatgtcgtttcagtatcaatgtaatctcgtttatccagaaggggcggggccaaactttggttttcgaaccgacgcgcaagcgattgatgtgttcgatgcgttaaaagttagttacgatggtttcaaagtgcaagctggcctgattaaggcgatgggactagttgattatcaattggttggtggtcgttacgaactagtcggccatgatttccgagaattacctttagctgagatcaatgcgaacttggaaacgatgcccggactcttggctcagggaccgatgccagttcgatatgtgacttatcgtcggacggatgaccctattgacgcggttggctttagtggcaactgggcactaggagatagcggtggctttcgacagttaagtgagacgttggcagaaccaatgcaagcaccagtggcggcgctaattaaggcaattgatcaacttggtttaacgttacaacaaattaatctacccacaccgcaaagttcaacggctttgccgacacatttgagtgatgatgttcatcaagcgaacgttgacgtgtgggtggtgttaacacagccacaaggtgacgagcagcaagttttgcagaccattcataacgctcaagagtgtaatgaaaaattgtgcgaagcgctgactcgtgtttatttgaagtaggatgtttcacgtgaaacaactggcacttggcagtccgttattttctttagtgcgttgcatgatatgatacgcacgaaccgtaacacatcttcacgggagaaaatatgttattagaaacttatcagcatcgctcatttatcaaacaaactggcaatatttctatcgaacgtgattgggaaaagcttttcgatgaagcgtggttgattaagcatcttcgtggctatcgctaagctcaagacttagaggggagtggtttgatgatgacatcgacaccacggttattacaagccattcaacaaacgaccaccgcaattttaaaaacaaaccttgttggtatttacctgcatggatcctatgttttaggctcatataacgaacaggtgagcgatttagactatctgatcgttgttcggcgttcgttaacattagctgaaaaacggcagttaatgacagctaccataacgcaattgtggccattagcgccacacaagggattggagtttcacgtgctgttacttagtgcaactcagcattttgcgcatccttgcccattcgattttcatttttcaaaataccattatgagcattatcaacaggcaccgctggcctacctaaagacgatgcacggtactgatcctgatcttgctgcccacttaacaattctccaagcagcgggacaagtcttgcttggaccagtcattacaacggtctttggccccattcctgcggtggcctactgggacagtatcaagtctgatatcgcgaatgctgaaacggcgatcgttcagttaccaatgtatacggtattaaacctttgtcgagttcgcgcttaccagcaagatcagttaattatttctaagcaggccgggggtgaatgggggacagctgccaacacagtggcatccgttgatcaggcaggcgtcagcagcctatgctggtcaacaggacgaacaggttatacgatggtcacgtccaaacttagtggcgtttgcacgaatcatgttagccgagttgggcttaaaatcagaatagtttgtgagtttaacaaaaaatgcttactggcgatcatccaccaataagcatttttgtcaccaccaacttaaagtcggctgttataaatcaagaaactaatgtagcagttatcgccatcaggtaaatcatagccagtgttttcgttgctaccgtcattttcgtgtaaaacaacgaattcaccagaaccataatcttggtcgtttaaatactttactaaacgttcatcacattcagctaaagtcttaccggtcacaacgcgccggttccaaccacgatggatctcagtatttggattaagcatctcttctcaactcctcttaattataaagtcatcaattgcgcttgccaagcgggttgctgatcaagatcagcgcgcgttaggtcagcgtcgacttggtgggtactgttaaaaataatgaaacgttcaccaacggcttggacttgctggtagttatggcttgccatgatgatagttttgccggcagcttgtagccgttgcagtagggttagcatttgctgctgagcggcaattgttaagccgttcagcggttcatctaacaataaaatttcagggttcaaggcgagaacgctggctagtgccacgcgcttcttttcaccacctgaaagttggtaagggacccggtctgctaagttagcacagtccgttaattgtaagcagtcggcgacgcgttgcgcaaccatggctgctgataaaccgagttgtcggggaccgaaagcgacttcctcagtgaccgacgtgttgaatagttgaacatcagtattttgaaagaccatgccgatccgctgatgaagttgttgtcgattttgggcatcagcgagataagtggtcgtaatcggctgatcgtgaaactgataagtgccactagttggactagctaatccactcaatagtcgtaaaagggtcgatttaccagatccattgggccccattagacagacaaagtcgcctgagttgaccgttaagctgaggtccttcaagccacacgtatcaggataatcatagcaaatattcaccaatttaatcaataccacgttaatgcctccaaaaaataaataatatccagacaataatcgctgggctcagggcaagataatcgcgccaatgggtacgacgcccggttgagcgcgcgtaatgaccattgaacccgcgtgcttccatggcagcgtatagttctagcgcataagtgtaacttttaagatataaattaccaaataatgcgccgattaaacggtatggatgagccgttggggcgaccgtccgcaattctagtgcttccatcgtcagcaatagatgttggccgagcattcgtaagtacgtgatggcaatggccaaagtcataattaatagatcagggcaatggagtgccttcaagccagccaataaatcttgaaacggcgtggttagacggtaatattgagcgtttgccagcattagactggttttaaggccaaagaataatagcgtggtgggaccggctaaccagtagctcggtaatacgaacagcatggccatcccaacactgattagccagcttcccataaaacggcgcagttggcgtggaggtaaccataataattggcacccaactaatagtgctaggccccataacagaatgagattattacttaaagcaattaaaatgacgagcaacaggagctgaattaatttgaattgcggtgcaacgcgccaatgagacgttgccgtgactggcgctggctgtgctagtcgactgagtaattggcgtaggtgacgctgattacgttgccaaaatttcgctttaatagcaggtgttggcgtggtggtcgtagtttgcagccaagctggaatatcagtgttgggacgtgtcggtttcatgttgaagacctcgaatcaaaagtaagaaaatcaaaacagcggtaatggccgataaaatataacccacactgaccggtaagcccgcgatggcgtaatcactgaacagggcctgaaaatggaacccgtggaccattccttgaggcgcgtgagtactgatatgttgttgcgctagccgttgctgtaattcttgggggctccattcgccccaagccgtattgctagccaacaagcctaatggtgataacaccgctaatccgagtagcagtgcgatccacggccgctgattgcgccgagtgggtgtctgatagaggttagtcggtgcgactcgttttacaaattgaaagacaagcagtgtgaagacgacttcgacccagccggcgactaataagtgagccgtcaacattgcgggtatcgtaatgttgaggccgtatgggcagtagagcggcgcaccacttgccgtatgagccagtatgggttgtaacccgagctcgataccagcaactagcgccgccatattaatgcccaagtaagcaccaattgcgagccccaacttttcatggtgccatttttgacctaggcgatagcaggcgtagccgacaaacggcataatgaccgccatattcaacgcgttagcgccaaaggctaggataccgccatcaccgaataataaggcttgtagtagtaacgtcacggtcagcgcaagacacgccgcccatgggccaatcaagacagctaacagggttcccccgacagcgtgagccgtggtcccacctggaatcggcaagttgaacatcataattaaaaaagccaatgaagcggcgatgccgagcattggcagggtttcatgatgttttttgatttgaactttaacttttaaaacggcgacggtccagacgggagccatcgcggtgaccaacgttccgcaagttgcgggacttaaataattatccggaatatgcacggatgagcacctcactaatttgcaatttgatctaagaggtaactaacatcttgaataataaatttgtgatttttgaccgtaatgacgccgtctgttcgtaattccttgagcatccggttgacactgctccgggagctgataccacagaaaccggcaatgtcgtcattggtgaccacaaagtcaatcagaatcccttcgttaacttttcgtccgaacaaatcaacaagactatagataaaggcacaaatggccccttttttaccgttcatgaccatccgttgcagtcgaagaatgttttcggacaactttttacggtaataatttttaacgtagttttgcagttcaggcgtgctgttgacgtacttccaaaaagcgacccggttgacctgataaaaagtggcgtattcggactcaatacggacgttaaacggttgatccgtagaacgagaaacttcatcacgcagcagggagatcacgtcgggcttggcaatataagataaattatattcgcgaccgtcttgtaaaataatgctgtttttgatgatgccgtcctttaagacgtacgtatagtgttcggctaaaccatgataggtcaggtaagtatgccgcttttttttgattgtcggcacgtgatgggcttccaaataacttagtaaatattcaatatcagttaataccatcttagtttttcagttctttcgtgaataatttttaaggttgaggtcagtaaaaatagcgattctcaacagtaatcacgacgataacgctacttaagcatagcggttttcatgattgtgacaatcgcatttaaagtatacatttgttaactatttttgaaaacttaaaatgtaacggacaagttatccgtcttctagtataacaaaacgtgcatgtaaaaattagtttttagagaaagaggatggctaaaagtcatggttgcaattgatttaccatatgacaagcgcacaattacggctcagattgatgatgaaaattacgccggtaagttagtgtcgcaagctgcaacatatcataacaaattatcagaacaggaaacggtcgagaagtcgctggataatccaatcggctccgataagctggaggaacttgctcgtgggaagcataatattgtgattattagttccgatcacacgcgcccagttccttcacatattatcaccccgatcctattgcggcggttacggtcagtggcgcccgatgcacggattcggatcctcgtagctactggtttccatcggccatcaacccacgaagaattggtgaataagtatggtgaagacatcgtcaataacgaagaaatcgtgatgcatgtctcaaccgatgacagtagtatggtcaagattggccaattaccatctggcggcgattgcattattaataaggtcgctgctgaagcagatttgctaatctccgaaggctttatcgaatcacatttctttgctggtttttcaggtggtcggaagtccgttttacctgggattgcttcatacaagacgattatggcgaaccattccggcgaatttattaactcaccgaaggcccggaccggtaatttaatgcataatccgattcataaggatatggtgtacgctgctcggaccgctaaacttgcctttattatcaatgttgttttagacgaagataaaaaaatcattgggtcatttgccggtgacatggaagccgcccataaagtgggctgtgactttgtcaaagaactttctagtgtaccagccattgattgtgacattgcgatttcgacgaatggtggttatccgcttgatcaaaatatttatcaggccgttaaaggaatgaccgctgctgaagcaacaaacaaagaaggcggcacgattattatggttgccggtgctcgtgatggtcacggtggtgaagggttttatcacaacttagctgacgttgatgatcctaaggaattcctggaccaagcaatcaacacgccacggcttaaaactattcctgaccaatggacggcccaaatctttgctcgaatcttagttcatcatcacgtgatttttgtgtcagacctcgttgatcctgatttgattacgaatatgcatatggaactggccaagacgttagatgaagccatggaaaaggcctatgcgcgcgagggtcaagccgctaaagtgacggttattcctgatggtttaggcgttattgtgaagtagtatggcaaccacagcagaaatattacaacaagtggcggcagggcaattaagtccgacggcggctgcccaacagttagaagcgggcaaaacagcggcattaggttttgccaatgtcgatttagatcgtcaacgccgcaatggctttcctgaggtcatctacggtgctggtaagacggcaacccaaattgtgggtatcgtgcaagccttgtcccaacagacgttgccgattttaacgacccggttatccgcagaaaaattcgcggcactccaaccagcgttaccaacggctgtctatcatgccactgcgcagtgtatgacggtcggggaacaacccgcaccgaaaacaccagggtacattgctgtggtgacggcggggacctccgatcaaccggttgctgaagaagcagcagtaaccgcggaaacttttggcaatcgtgttgaacgagtctatgacgtgggtgttgcgggaatccaccgactgtttgccaagttggatgtgattcgtggtgcccgggtggtcattgtgattgcgggcatggaaggtgcgctggccagtgtcgttggtggactagttgataagcccgtgattgcagtgccgaccagcgttggttatggtactagttttcaaggtatgaccgcgctattgaccatgctcaatagctgtgcgtcggggattaccgttgtcaacattgataacggctttggtgccgcctactcagctagtatgatcaatcaaatgtaagattcagttaactgaacaaggagaagataaatgcaaacactttatttagacgctttttcggggattagcggtgatatgtttctgggcgcgttactcgatttaggacttgattttgagcaattaaaaaccgaattggctaagttacacgtgcacggttatgaattaacgcagcaacgggaagcccagagtagcatctatggcacgagctttgatgttcaggttgcgggtggtaaggaccatggttttgtggaacatcaccatcatcagcatgaagctgggcatcatcatgatcatgaagcgcgtcatttagctgatattgaggcgttaattgacggcagtgacttatcagataccgtgaaacaccacgcgaaagcgatctttatggaaattgcgcaagcggaagcagcggttcatcacatgccactagctgaagttcatttccatgaagtgggcgcgttggattcgattgttgatattgtgggctgctgtattgggttggaattgatgcagattgataccatcatggcttcaccgttaagtgatggtagtggttttattaacgttgcccatggtcagatgccagttcccgtaccagccgtgatgcagatgcgagttggtagtgccattccgattcaacaacggttggatgtgcatactgaattgattacccccactgggatgggcttggtcaagacgctcgtacgtgaattcggaccgttaccggaaaatgccgtgccaactagagttggttatgggtttggtaaacgggacacgggtggtttcaatgcactgcgagccgtattattcgaaaaaaaaaactaagtcagcaaatcgttaaccggacggctgatgctgtcttaatgattgaagctaatctggatgatcagacgggtgaaggactggggtacgtgatgaaccagttattaacggcgggcgcatacgatgtgtttttcacgcccattcagatgaagaaagatcggccggcgacaaagttaacggttttgggaaacgttaacgataaggacttactgactaagttgattttacaagaaacgacgacgattggtgtacgttaccagacgtggcaacgtactattatgcaacggcacttcctgacggtcgcaacgccgtacggtgacgttcaagttaaagtggcgacatatcaagatattgagaagaagatgccggaatatgcggattgtgcccagctggcgcagcaatttcatattccgtttagaacggtctaccaggcagccttagtggcggtagatcaattagatgaggaggcgtaattttttggtacatcagttgattgctgaatttatgggcacagccctaatgattatttttggggtgggtgttcattgtagttccgtattaaagggaaccaagtatcggggttccggtcatatttttgccattacaacttggggttttgggattagcgttgccttattcatttttggcaatgtttgcattaacccggcaatggttttggcgcagtgtctattaggaaatatcgcatggtctttatttattccgtattccgttgcggaagtgcttggtggggtcgtgggctcagtgatcgtttggatcatgtatgctgatcattttaaagcctcaacagatgagatttcacccattacaattcggaacttattctgtacggcaccagccgttcgtaacttaccgcggaatttctttgtggaattatttgatacatttatttttatttcgggtattttagcgatttctgagattaaaacgccgggaatcgtgccaattggcgttggcctacttgtatgggccattgggatgggacttggtggtccaactgggttcgcaatgaacttagctcgagatatggggccccggattgcccacgccatcttaccaattgccaataaagccgatagtgattggcaatacggtatcattgtgccaggaattgcgccctttgtcggggcagcaattgccgcttggtttatgcatggcttttttggaattaattaaattaaatagaagaagggttttattatggcaacattagcaacaaaaaaagcaacgttagtagcagcattaaaggatttacaacgggtcaccgtggccttttctggtgggatcgacagtaccttagttttgaagatggccctcgatgttttaggccgtgacaatgtgaccgctgtggttgcgaactctgaattatttacggatgaagaattcgataaagcgatgagcttagccgaagaactaggtgctaacgttcaaggaactacgctagactacttgagcgatgaccacatcaagaacaacacgcctgatagctggtactatgcgaagaagatgttctacagccggttgaatgacattgcggctaataacggtagtgccgctgtcttagacggtatgatcaagaatgatgaaaatgattatcgtcctggtttgaaggcccgtagtgaagcgggggcccggagcttgttacaagaagctgatttcttcaagactgacgttcgggccttggcacaagaactcggtttgacgaactggaataaagtggcgtcatgctctgtatcttcacggttcccatacgggacgacgttgacacatgacaatattgctcaagtaatggccgccgaaaaatatttgcgtagtttaggttttccaacggtccgggttcgtttccacaatgatattgcgcggatcgaattaccagaagcacgaattggtgatttcttagtctttaacgaccgcgttaaccgtcaattacaatcacttggattccgctacgttacccttgatttaggtggcttccgtagtggtcggatgaatgatacgttgaccaaggcacaattggccactttcgcctaggcctaatcaaattaatgatagtggtgtcgggattaatcggagatgggcggctgaacggcggtgatcatggttcattcgcccacccgatgataatcgtaaccccagccgatacgcacatgttgcgattatcgcctgacaccccaaaaagcgcagttcaaggccgcccttgagctgcgtttttcgtatcttcatttttagatcaacaggcgtcaaaagtcacgacgagtttaccaacgacttgaccagcttggagttgttgtaaaccacttacaagttggtcacggtgcaagacctgagtaattagtgggtcgaccttgccagtttggaccaaagctaataaggcggcggtcatttgcccaagatcggcaacttgcgctgggttaccgctacggtgggcaccaccgaggtccaatttactgatagttacaacttgattacttggaaagtggtccggagttgctaatacacagacaagctggccattgtaagctaagcgcggtaagtccgcatcagcatgaccaatggtattaatgatcagatcaacaccgtgctgctgcgttaggtcttgaatgcatgtggtcacatcttcatgatggtaatcgatttgggcatcgggatgcagcggtgccacgaaggcttgcttggcctgtgaaacggtcgtgaagacggtcttgccagcagccttagcgagttgaatagccatactgcctacaccgcccgcacctgcatggatcagcacagtttgcgcggcatttaaattggctttgcgcaggagggcctgataagccgtcaatccagcgcagagactagcggcggctgcttcaaagctcacagtcgttggaatcttagctagcacggctgctggtaaactcacgtattcggcaaacgtcccattattggcgagattagcgtgcccacaaactcgttcgccaggccgaaaattagtgacctcagcgccaaccgcttccacgattccagctgtgtctagtcctagtgtgtgtggatattgccaggcggcgttacccgccgtaactaatttaaaatctaccggattgagcccgactgcttgggtcttgatcaacacctcagttggcccgaggttgggcatgggccgttcttgccattgaagctgtttcatagtttgagcggatggatctggcacaacaagtgcttgcatcttcaatcattcttttcttaaaggcatatttgctttttattataaccggtcgcggcggtgaatttaaactttaatgcctaattaattaagtagcaatgagggtgattcggctaacggaaagattgacgttagcggttacaatcgttagactaaggttagtaattgaatatttttaaacactaggggtgtccaaaaatgggctgagatggtgctgtaagtgccgatccctctgaacctgtaagctcaaacttgcgtaggaaagtgtcacagctaatgttagcggccactggatcaatgcatgttgattggtggtcgtttttgattggtgtgacggtcaatgaggaggagaattgctatggaattacaattattgaatactttacgggatcacaatccgattgtttttaacattgccaattttgttacggttcaagacgttgccaatgggctaaacgcgttaggggcctcgccaattatgtcagctgaagtccaagaagcagagacgatggtccaaattgccggggcagtttgcattaatttaggaaccttgaccaccacccagattgatcaaatgcgagtggttggtaagcttgctaatcagtatcataagccagtcgttcttgatccggtggccgtcggggcggtcccttatcgaaaagaagtcgcgctagcattactatctgattttcaagtcgatgttattcggggcaatgctggtgaaattgcggcattggctggcatggattggcaagcgaaaggcattgatgcggggagcggtcagggcgacctggttgaaattgctcaagcttgtgcacagcaatttcaatgctgtgtcatattgtcgggacctactgatgttattacggatggtcggcgcgttgttaaagtcgctaatggtaccccgcttttccaacgtcacgtgggctcgggcgatttactttctagtatcgtcgcggcttttacagccgttagtccaaccgatatttaccaggcggcgcaaatggcttgcttagtcttagcgggagcgggggaacttgtcgccagtcagctgacggccgatcgtcccgccacatttgccattgatttgattgaccggctgagcttagtgacagtgtcagaaattcaaacaattgctaaagttgattaaatataatgaagggtcgcgagatttaatgaatgaatttccacaagtggcaacgattgctggtacggacagtggtggcggtgccggtgtcatggccgatttaaaaacgatgcaggcacgtcacgtttttggtaccgcggtagtcgttgccgtgacagctcaaaatacattgggggtccaagattttatggcaatgccgacgaagctcattgacgaacaatttgcttcgttagcagctgacttagacattcgcgcttgtaaaacggggatgcttgcagatgctgaacatgtccatgccgtcgttgagaacttgaaacgagttgattttgggccgctgacagttgatccagtcatgattgcgaaaggcggggcggcgttattagccgcggatgcgattaaaacggttcgcgacgaactgatcccgttagcgactgttgtgacaccgaatttaccggaagcagaacgattaaccggtcaggcaatcactagtaatcaagcgatggttacagctggacatgcgctacaggggttaggtgctgacaatgtcattattaaaggtgggcatggtgataatcctgatttagctaatgacttcgtattgttggctgacgggaccgccttttggctttcggctccacggattgatacggtgcggacccacggcacgggagatactctatcggcatgtattaccgccgaattagcaaaaggacggtcaatggctgcggccattaaaacggctaaggcgtacgttgctgggacgattcaggatggtatccaggtcgggcatggtcatggcccgttgaatcattgggcaaccccaagtgagcaggtgatcgttcatgacgcttaaatttgaacccacacaattacgtgcttattttgtgtgcgggacacaagacgtgccgggacaggatctgaatgtggtcgtccaaacggccttggatgcaggcatcacggcatttcaataccgagataaaggcaatagccagttgactacggctgagcgttttgcattggggcagcagctgcgggaacgctgtgcgcaagcgcatgttccctttatcgtcgatgatgatgtcgagctggcactcgcactgcaagcagatgggattcacgttggtcaaaaggacgaccgggtgacacaagttattcaacgggtcgctaatcaaatgtttgtcggtttgtcttgttcaaccttagctgaagtgcagattgctaaccaattggaaggcattgcctatcttggtagtggtcccatctttccaacgacatctaaggccgatgcggatccagtagtcggtctgacgggcttgcgacaattagtcgtgactgcaacctgtcccgttgtcgccattggcggaattactgtcgcgcaattgccagctattgcggctactggtgcggctggcgctgcggtgatctcaatgttaacgcgtagtcccgatatggctgccacggtcaaggcgatgctaacggctacggagggtcactgatgaaacatgacgggatttttcggagccaatttttactgtggctcggtgcggctatctcaattgccgaaatcttaacaggtacgctgatggcaccactggggctgacacgcggattggctgcgattgtattggggcacttgatcggctgtggcctgttcttggttccagccggctatttgggggctaaattacaccagtccgcgttagcgtcagcccaactggcttttggtcgcggcggggtgttactagcgtcaggactcaacgccttgcaactcgttggctggacggcggtgatgatcgtcaatgctcagttagccatgaacagtattagtggaaagctatttggctttcgaagtccgctattaatggcaaccatcgtggcgattttgattattgcgtggttgctcatgggtagtcagttactgttcaaaatcaacaatgccgttgtgggcttgttggtgctcgggacggtgttaatgctcgtaatggtatttatggcaccgacaactagtcagtcggtatcaacgactagtatgacgtttgggcaagcagtggaattgaacgttacgatggcactctcatggttgccactaattggtgattatacccagcgtgttgatcgtcctttaccagtcgcactagtcagcgcgggtggctatatgttaggcagtttagtgatgtttgtgacggggctattagttgtgttacggacagggcaaactgatatcacggcattgctgacgcggtccggtttaggattggttgcattgctgattattgttttctcaacggtgacgacgacatttttagatacttattcggccgccacgagtttggctaatctgaccgatagccgctatgttaatcgattagccgttggtgtgacggtagttgggctattgattgcgctgacggttgccatgacgtattatcagaacttcctgtatttgattggttcggtcttcacaccgctatatgctattatcttcgtcacgtactttgtgcgtcacgctacgttaccatactggttgaacttttgctggtgggttgtggggattgtcgcctattatcagttacaggccattgatttcattggtggcacgacgctattagtattggttgggctgagcatcgccgtctggttgacgggaattatcgtcaaaccaaccgagctcgaatatcgcgagcttagtcattgacaattagatgtaaaaagtaaatgataatcccattggtaatacgcatgttaccgtgggatttttttgagagagggcgacagaatggttaaaccgataattggaatcgcaccaggcgttgtgacagtgaacagccagatgttcccggggcgggtccgtgattatgtgaatcgtgattatttgaaatcagtaacggataatggcggtgtgccattggtattaccggtaacgaccgacgcaacgacgattgaacgatacgttggaatgatcgatggtctactactttgtggtggtgcagatgtggccccattgacgtatggggaggaaccccagcctaaattgggtggggtagatccggaacgggatcagtatgaaattgcgctgattcgtgccacccacgccgttggtaaaccggtgctcggtatctgtcggggcttacaaatcttaaacgtgtgctatggtggcaatctttatcaggatatgagtgaactaccagctggtcagggtaccttaaaacatatgcaaggacaattggccgcttacggcatgcatcacgtgaaggtcgtaccaggtacgaccttggctgaatatttaggcaccactagtgacgcaatcacggtcaattcatttcatcatcaggccgtgaaacaagtggcaacgggctttcaggtggtggcccaaagtgcggatcaggttgttgaagcaattgaggcgacagctggtggtctacagttgggtgtccagtggcatccagaaatgatgcaacaagtaaactccgtgcaggcgcggttgtttgcggcgtttatgcgggcttgtgtggcgtagatagcattgactagcaaattgataaaattgggcgtggttattctgaattgtaggataaccacgtttttaatgtgcagccgcaaaactaatgaatgtttcgcgtgaaacatctgaaatggtgttggcaactagataactaatccaagatattgtaagctgacgtgtaaaacaattcgtaaagctgttaatactggcaacgctttcgtataatggaataaagttattgttaagggggtgaccgctatggaacgaattgaagctggcatgagcgtaatgacgttgaagaagcagacctatcgggttatcgctgtgattaatcaggggcaagaactgttagttcgcgcccacgaaccagaaacagctgacattgaaataattccagtgaccacagttgttcaagtaactgaacaaaattcaacaggcgatgcagccgtctcattggatacagtcacggtcgttggcgaacggtatgtcgatgatattgtggcaacgttaacgacgctcagagtgggtatggcggtgttgctccagcgagaaagtggcaatcaatacgatgataatgccatctcagtgtggacgttgcaacatgctaagttaggctacattgcccggtatcagaatcagccgtacgcggcactgatggatcagggacaacgattgtacggcatcgtgacggtattagatcaacaaaaacagcatcttgaattgatgctatggcggactactgcagtcccaagtccgattgaggcgttgcaaatccgccaacgattggctaagccgaggacaaatttaggggcggtgccaacgcattcgttacagacaccgttaggaacaattgtcatgatgtgcaatggtcacccgattaagtatcagcaggttccgttatcgccatggttgacgcccgctgatgaattacacgtcaccaaacgttatctattaacgcctgattggtcacaagtgccgccggacagcctcattacttgtcaagtgacggcgaaggccgacgtggttcagcggtggcaaaatgaacacatttcagcagcggtcttaacgaacgctagtagcttttatgtggttggtatcagtgctcaaaccaagacggggctgaatgataacttggtcgatgatgctgcgcaacccgcggttatttaccgagttggccaggttagtgcacatatgcaggccggcttcatggtcagctgggcgccgtttggtgatccgcgcgtacaaccagcactgaaattagcattgcacttctcctcacaaccgctagttccttaccatccagtaacacctagtcgcaccaacgcgacgtttacgcagcaagagttggcagccttgttagtctccgcattaccaaattatcagggtggtcaacgcttagaaccaagtgtgacagcgataacggtagaaaaattgcggcagacgttaggtgatcagacgtatcatgcgctggcgaattatcagcgtcatgttcagctagttgcgggtagtacggaaggtgtcaacgagaccttgttacaggcgttgattcatgcagtcacgtatcatgagttgacgaccatgcactactaccagccgactgtagggatggtcgaccaggttatttatccgattcaattatttagcaccacgactaaggatgaggatgatgcgcaattagtgggttgcttagcgctttacaattacgaaacatttgaaatccaacaggtgccgctgacggcaattgctcgtatcgcgattattgccgatccggagcatcccaagacaacaccggagacggaaagtccggattggttacgcatatttttacatgggtggaatgacgatttttgaacgaacagtcaaaaattaatttgcttacgacttataagtattcgtgatacaagccagattgaattcgataaaaaatcccgctgaggctttaaactcagtgggatttttggttaggttatttggttgccgaatgggtctgtaaatattcctgggcggcgtgaatcatatctgcattttgttgatttaacaatggcggcaagttgtcgaagtcaaagtagtcgagtttgagtgtttcatcagtggcttgggtcagaacgtggccgccaatgggttttacaagaaagagtgcactgattgtttgagctacatcgccgttaggataggccgtctcgcctttatcaaagatgccgatgcgatcaacaacttcgacatcaatgccactatcttccttatattcccgcacgcaggccgtggcatacgtctcaccgtattctagatagccaccgggtaaactccagttatgcgtatcggtacgaaggttcagcaagacttgttgctgatcgttgactaaaataccagcagccgtattcaaaatgattggtttgtgaccaaccaaagcccgaatttctttaatgtaatttgccatgatgaaacctcgtttctagtttaattacccttattataccgataattctgactgaaagctgtttgttgataaatttatacgaagcatgctcgaaccgcgttagagcaagtacatactgactatgtgtcactaaatccgtttgcgtcggtgcacttttttagctaagataaaagctatatactgtcagccgtgatagtgtgagttctttgattttatgaaaagagagtaatttatgcagagaaaattaagtacgggccagatgcaaatgattgcactgggcggcacgatcggagtgggcctatttatgggatccagctcaacgatcaagtggaccgggccgtcagtgctaattgcgtacatcgtatcaggggcctttctatacctgattatgcgggcactaggtgagatgctgtatgtcgatccgaataccggttcgtttgccaagtttgcttctgaatatattcaccccgtttttggatacttgacggcttggagcaacatttttcagttcgtcgttgttgggatgagtgagatgattgcactaggcggctactgccggtattggtggccgaacttgccagattggattccgggcctaattgccattgtattcttatgcgcggccaaccttatctcggttaaaatgtttgggacgctggaaacctggttctcacttattaaagtggtgacgattattctgatgattattgccggtttaggtctgattatttttggtattggtaacggcggtcatccaattggaatcagtaacctgtggacccatggtggtttcttcactggtggggtgaagggctttgtcttcgcactagcaattgtgttggcgtcgtatcaagggattgaattgattggagtcacagctggtgaagctgaaaatccacaaagcacgatcgttaaagcgattcgttcaacggttgcccggattttaatcttttacgtgggggccatcttcgtaattgtcagcatttacccctgggataagttaagccagattggttcaccgtttgtacagacatttgccaaaattgggattaccgctgcggcttcgattatcaacttcgtggttattacggcttccttatcgggaacaaattctggaatttatagtgcgagtcgaatgacttacacgttggcggaaagtcaccagttaccaaggaagatgactttattaaatcgtcatggagtaccattttattccgttattgcgattgcgaccgggattctaattggagtcgtcttgaatgttgtattaccaatgtttttcaaggacgctagcgagattttcgtgatggtttacagttcgagtgtcttgcccggtatggtaccgtggtttgttattctagtgagtcaaattgcgttccgtaagcaaaacgcggccaagatggcgaaccatccttttaaaatgccattatcaccctattcaaattatttaacgttggccttcctcgcgttaacactggtcttcatgtttattaatccggaaacgcgctactcaattttagtcggtgttgtatttctggtcatcatgacattgatttatttccgtaaatacgccggtaacaaggaagaaacgttgtaatcaagagtacttgccagtaaatggtaagtgcttttattttgggcttttattgcgttaaaattaggtgtcaatataattatcaggaaaagtggtggcacgatggtcaagcaaggacattatgcaaaagtcagtaaacagaaacggttacgacaattaaagcaacgacgtcaggcccaggagaagcgggcgattatgccggaaatggttagcgaatttttgcaagtgcgttaccacctgacgcaagcggcaaaacagcggccggcgatgcgacagatgatgcaacgttttatggcacagtggttagccgcagggcaagcagaattgagcgacaatggtcagacaacgtggtcagtagtggcattgacgaagcaaacgttacagacctttaatcggcagttaccgtggcaggggtatgccttagttgaccaggaaatgacacgctggacggcttttctgaacaaggaagtgccggctgtgccgttaagtgagcggattacgttaactgaggcactgtccccagcgacgtggcaggcctgcctatcagagcaattagcaatcaatgccctattagcattaactggtgattcacgacaattgggccaaataacgactgagcaagtacgacagctacaaaacagtattcaaacagcaacggggattgattgggaaaaggttgctcagttgcttgattcgacagtaattgcccagaatacactttccgaagctgggttggatgacaaaacgcgccaatggctagaaaaattacagaagctaacgccacaagattttaacagccatgttgaatgaacagtcaaaaaggaggatggtgaaatgcattttatcacgtcagatcacgttcagttagattatacggatgaaggccaggggcagccaatcgttattttgacgggatttggtggcgctaaggatatttggcgcgctcaaatcccggtactgattcaggcgggctaccgggtcattaatttagatgggcggtgccaaggtttatccgagcacacggcgaaaggcttacgtatgagtcgtcgcgcggtggatgcgcatgaattgattgaaaaattacaactcgaacaaccaattttactcggtaattcgatgggggccgcgacttggtttgcgtacgtgtcattgtatggtgatacaggaattaaggccctgatcgacgtggatcaaacgccgcggatgatcaatacaccgcactggcaatatgggttcaaacaggttcaatggcaggatattccggactattttagaatgccgctgggacactcgacgtttaagcacatcgatgatgcgacgtatgcgcgcgtcaaggcagtagaagcgcaggcaccgttcgatgcgaaattaatgtttccattgttggttaaccacgcggttcaggattggcgggatgtgatccgccaattgaccgtaccgttcttgatcattgcgggcgccaagtcaccgttcttcaatcccgactttgcggcagtgactgctcaaatggcactacgaggacagagtgtggtcattccggaagctggtcatatcgtgatggcggaacagtcggcagcatttaataaggcgttgttggaatttttggcgacgtgctaaacgcaaaacacttttaacacctgtattaaaggtgatattacagtcttgaatagtagtcatatcaagcaggtttagaataacataatgtattatgttgtcttgaataacggccacatcaaaaacagtttcacaatactaaaaaaggctcaccaactaaaacaggttggtgagccttttcgatttattgactaattactaatcaatcacgccatcttttcccatccatcggaaccgaataaacttcccgacctcggtcacaatcaagacgacgatcccacagataatcgggatgccccaaccataccagaagttgatgctagtcgtatggaagacggattgcatgaatggtaggtaaatgattcccagttgtaagagaatcagaataccaatgatgtagaacgccatcttattttggaagaagtacttggaaatgacggggtggtcattccgcaagttgaagaggtagaaaatcttaccaaagatgatgatgttcagtgacatggtactaccgacgacatttggtaatccaagtgcggtcaagtagttgtaggcgaagatccccaagccagaaattaggaaggagacatagccgatttcaaagtaatctaattttgacaacaacccagacttaacattccggggaccccgggccatgatgccggcctcgggtggctcaaagatgaacgcaaactggatggtcagcgcggacaccatattgatccacagtaattgcgtcgggtacagcggaagttcgtggcccattaaaatactaatgatgacaacgaggccttccgcgaaactagttgggagtaagaagcgaatcgtcttacgaatgttatcgaagacgtggcgcccttcacgaacggcggcgacgatatcagcaaagtcatcatcggccaggaccatatcggcggattccttagcaacttcggtccccttgattcccatagcaaccccaatatcggcttgcttgagggccggggcgtcgttgaccccatcgccagtcatcgaaacgacgtgattattggcctgttgggcacgaacaatccgtaatttgttattcggtgttgcccgtgcgaagacgttataatcatcgatgtgtgcttgtaactgctgatcgtccatcgcgtcgatttcgggaccagtaatcgctttgacattggcggccaagttcaacttgttggcaattgccatcgccgtatcagggtggtcccccgtaatcattttaacttgcacgcccgcttgccgtaattcggcgatcgcggtagccgcttcttcacgaggcgggtcaatgattccgactaagccagctaaatgcagcccaccaatggcttgtgcatcaatggtagtcacgtcatcatcgacttcttggtaagccagcgccaccacgcgcaaaccatcggcggttaagtcgtccatggcgtcatcccagtatgccgtttgggtagcttggtcagttaaacgcaggacagtcgcgggtgagcccttgaccattagtaagcgttgaccatctaagtcggccaggcgagcagaaaaacggaaggcggaatcgaatggtagcgagtcgacttcttcaacctcaggatcatgaccagtcattttacgatacagcgtcgtcaaggcaccatcggttggttcaccagtcagttcccagcgattattttcgaagtgtagctcggcgtcggtcgtttggccggcaatcttaacgagccattccatcgcgttatcttggtgccagtcgactttgttgccattgagcttgagatggccatcgaagttaacgccaccattatcatcataaccgacccccgtcacatcaaacgtatgctcaggcgtcacgaccttagtgaccgtcatttcatttttcgtcaacgtcccagtcttatcggtgttaacgatatctacggcacctaaagtttccacggcgggtagtgacttgacaatgacgtttttcttcgtcatctgccgggttcccatggctaagaccaccgaggtactagcgggcagtccttctggcatagaaccaacgaccatcgtaataaccgcaattagtaaagttggcaaactataggtatccatgaccattcctaataggaataataggacggctgccaccacgatggcgatggataagccaacccccagtgagttcagattacgcatcagtggggtagtggtttgtttgacgtcgctaacagactgctggatatgaccgatttcggtatcttcggcggtagccgttacgattccgacggccgaaccgctagtcaccgcggttgacgcgtaaaccatattcttacggtcagccaaagctggcgtggtctcagtcatcggttcttcttgtttctccacgggattagtctcccctgtcagcacggattcttggacgttaaagttatccgctgaaatcaagcgcatatcggcaggaaccgcgtcaccggcttctaagttgactaagtcaccaacgactaattcgcgggcgtcaatttccagtttttttccatcacggatgacgaaattcttggaaatcagcatttcacgaatccgttctagcgcgttgccagcttggcgttcttggacataaccaatgatggcattggcaataataaccagtccaataacgatagaatcggaatagtggtgcatgaagaacgttaagaccgctgctgcggctaaaatgtagataatactgttattaaactgcttgatgaattgaacgaaccgagacgtacgcttggtctccagttcgttgcgaccgttatgttgtaaacgttcggcagcttcagcagtgctcaatccattctcaggatcggtggcgtactttgcggctaaggctgattcatcaagctgccataagttatccgcatcgggagggttctgggtgtcgttttgctcttcattagaggttaacgactgattgtcatcttttatcattcaattcgctccttaaaaataaagttattaccggtgaggttctgtaaaatcacgacgtttattgcgtgttaaataggccaatttcgccacatcctttcttaattagcgttattataaataatattatatacgaacaatctaggtgaacgccattaaaatatttgacaaattcatgacaaattattgcgttagttgcaataatatatcagattttggctagtttgtcgctgaaaatgactggttttcctcgaattgttgggtaaattgaactagagcactatgatccgcaacattggggtgcgggcggtgttcttgctgccattggactagctgtggaaagtttggccgcatattagcgaataaaaaacgagcagtcgatgactgttcgttaatagtggctaatccttgatggggtccttcattaataaccagagaatcaggtaagcgatgataccagggaacatgggtgtaattgctaaaacaacaaataatagccgggtaacgttagtattccagttaaaatgttcggcaattccaccaatgacaccggcaatcacccggtccgttgcggaacgatgaatatcgatcttcataagttaattcccccttaataatgctaactataatgtagcaggtttgattcaataacgctactaatttaatcggttggaaacggcgtagtggtaagaaccgtggtatagtaggtgatttcagtcaaagcttggtgaagtgtatgatcgtagcgtttgctcaggggcgcgttatcgataaagtgaccgttactttgaagggtttgtggtacgttaccaatgggcgttggtttagggaggacgactattcctaatcgttggagaactggaactagtgcggccgccccaaattgaccgccgcgcatattgtcagaatatgagataatcttagccggtttacgggcgccttcgaatgccaaaaaatcgaaggcgtttttcaatccagctggcattgcgtgattgtattcgggtgtcaggataatgtaaccgtccgcactagccatatcggtgagccattgctgctggttagcaggtagctcgcggtgcgggttcgccatcggtggctcgggttcgtcgaaaaggggaagttgatagttggccaaatctaaaaattggtagtgaatcgtagaatgagtcggtaattggtcaatgattaattttagatggttaaataaagcgcggccgttagcctgtgaccgggtactccctaagatgattgcaattttaaacatagtgaggcctccagatatttttattgattccaatgaatacaaaatgatagtatagacttaataatattagtatgcaagtatttattcacttgaattaaaaaggagctatttaaatgacaacaccattagttagtcagttgatgacggaactaaatcaatttttgacgcaggatagcgttgatgatcaagaaaaacgctgggccatgcaacaaacgactgatccgcaattacaagcggcattaaaacaactatcgacgacggatattaaaattatggcgtatctgggacagcacgggccaagtcgagctaagacactgccggtaccaacgggtctctcacaagcaacgatttctcgcggcttgaccaaattagcccggttagaattggcgactaagtatcgtgatttgaccaataataaagaagttctcgtacgattgacggcgctgggtgaagcgggtgccgagctgcatactcagttggatgcggcgattgcagccaaggcacaagcgattgtcgatgactactctgacgcggaactgacacgctttgttagcctcatgcgccggattcgtgaaattaagctttagcacttgatgttaccgagtgctaaattgttgcattcccacaaaatggtgttagtatatatatcgaaggtcaggaaaggtcaaacaaggatttgaattactgaccagtattaatagccaagtgaaattttgaaaggggattgttagtatggctaatactttaatgaatcggaacgatttcggcatgttggatccgtttgaacggatggcacgctccttctgggcaccattagaaaacatggatcaagtattgaagaccgacattaacgaaactgatgatcagtatcaagtgaaggttgatgtccctggtattgataagcaagatgtgaagttggattatcgtgacaatgtgttgtctatcaaggttcaaaaagatagctttgtggatcatgaagatcaagaccaaaacattgtgatgaatgagcgtcatactggcaccttgcaacggcagtatatgttaccaaacgttgcggcggataaaattacggcatcccaagctgacggtgtcttaacgattacgttacctaagacccagccgagcgcgaatgacggtcaaatcgaaattcaataattaaatcattaaatcatcagtaacaaatgagcggcccaccgataatcaaatcggtgggccgtttttgacatcaacaatcggtatgaattatgaccggtggttggtaagctgttggtttagctggatgactttgatgcgggcgagtgccatttcaattaaccatagaccgatatagactccggtgtaaaccaaggtatagaagccaaaccagcgaacgtttaatggaaaccagccacagagaatcgcaagtggggtcatccctaggtaagaacacagacaatgagcaatggtttgtttcgtaatcgaccacgtttcaatttcgaatagccagctactgaatgcccaaacttcaccaatcagaatccacaataatgtcgaaagctgggtggcggctaagggcgaggaccagtggctgacaaaagtgggattagaaggaaataaataggtggtattaaagaaggttgagaaccccaaggccattaagtagccgataacgatgtctccaatggcgccaatcaaaagggtgtgccaaagtcttttcataattgtgccgcctttccaatttgttgggtatagcgtcgtgatgcgtatgttgttgtgccagttgttaggttgacttgaaagctaccccatttggttaaggtaaaatttttaatacaggcgattcgcacaatttcactactagaaatacgtagaaattggtggggtggcagttggtccattaaagtgtgtaagtggctgtgaacgaggtaagtaccagtggttgtttcacaataaagtcgtttattgacagtgtaaaaacgtgacaccgattgaagtggcagcttaatgagcgagcgatcttgaaaaacattgatgaatcgtttcagagatggttaactggacgtgcatcgctgattctccccttaaatagcgattttgataagcttattgtagtgaaaaatgcggcttgacactagtgcttattgctacttggtcaactaaacgggctaactggtcaggaaatatgacaaaaaatttcccgggaaataattgtcactggtggtcgctaaatatgataagctaattaacggtataatacttactgaaaattagtgtcagttagatatggagatgacgagcgtggatgacgcagaacgtgaacgcggaccatggcatcgtaatttgattgttttatggttttgtacgttcgttgcgggaatggcatttagcgaaattatgccatttctttcattatttgttagtcagttgggtgatttcacgaaggcccagattacattttatagcgggttagcttttgcagctgattacgcgatttcagcaatttcggcaccactgtggggcatcattgctgataaaaaaggtcgtaagatcatgctattgcgcgcgtccctagggatggcagttgcgatggggttaatgggttttgtaacgaatgtctggcaactagttgccttgcgcgcgctacaaggtgtgtttgcgggctttatttctaatgcccaagccttagtcgcgtcccaaacgccacgtaaatatagtggacgggcgttgagcactttgatcactggtgccgttagtggtcaattgtttggcccagtgattgggggcttgctagcccaattgttttcgattcgaaacacgttttttattacggccggattattaatggtggcgtttttgttgagtctgttctttgtacaggaacacttcaaaccagtcgcacatcatcgtgaaccaggtgacagtcgcaatcctttagcagcgtttcaaaatccgcgcttgattattgtgatgttatgttcgacggccatcgtccaatttggaaacgcctcgattgcaccaatcattagtttatacgttcgtgaattgatgcattaccgtggcccgattacggttgtggccggaattatcgcagctttaccgggtatttcaaacatcttttcagcaccgcgccttggacgttatggtgatcagcacggttctggtaaggtattgttatttggctatatttttgcggtgattatgtatttcccacaaggcattgttacgagcgtcgtggccctcggtattttgcggtttgccattgggatttccgatggcgcactatatccagagattcaaacggttttgactaagaatacgccagtacatcttacctcaacgatttttagctataatcaatcttttcaagctattggcaatatgttcggcgccttgctcggtggtttggtggctggttggttcaattacaacgcggtattcattatgacggcgttacttttgttaattaacctaggtttaattttgtggttagttcctgatatttggaagaacggcaaacgggcagtttcctaggtgtttggtagttagtctattaaattggctagctgccttttttgttacttgtccttgaacatgatgttaattcagtgtattgttagtttcatgaatatcgaaataagcaaacaagatcaggctgatcagcaacgagtggcgattttcaaagcactggccgatgctaaccgattacggattatccgggtgctctatcaagcacaacgggaaatgacttgcagcgaagtgggggcgcaattaaatatcagcaagtcaaccgtctcttatcactttaagaccttgcggttagtgggtctcaccaatacgcgacgaaaggcacagacgaagtatctatccttacaattagcgacctttgaccggtttttaccggggttcttagcaacgctttagtttttttgctttttagttcgacaattatcgaactaaaatcttggaaagaagatgtcaactacttatgaccacaacacatcaacatagccgctatttaacacttggaatgatgttagcggcaacgaatatgcgtttaccaattacaatgatgccgggattaatcagttctttgaaacggacactgggtttgccgagctcgatggcgggattactgaccacgatcccattattgacgtttgccattatgtccccattgattgcacattgggggcggcgatttggcaacgaactgacaatttatgtcatgttgatctttctagccgttgggagttatctgcgggtcatcccaacgattgctgcccttttcattgggacgttactagtcgggattggcgcggacggtggcaatgtcttgattccagcgattattaaagataattttccgacgaagattccagtcgcaactagtcaatacacgctctcaatgctattagtcggttcactgggaacgggactttcgggagtgttggcggcacactggtcgttaccactaacgatggcggtgctatctgtgattggactaattaatttggttgtctggttgccaaacttgaaatacaatcatcgcgcaccaacagttgcgatgaccgcgagtgatgggcagtcaacggcaactcacgggagtgtttggcggcggccgttagcgtgggtcgttacggcctttttcggcttgcaagcactagtctactattcattactgacttggttaccaacggtatttgttgcccatggcttctccttgattgtggctggcaatttagttacggtcatgcaattgagcggcctaccgatgtcatatttagtgccagcgacttctggtcatcggcgcggcgtttgggcaatgattatggtggtaggtgtcggttttattgcgggaattggtggtatcttactttccggaacgaatttttgggtggcagcactgtcctgcgtcttactaggattaggctctggagcagccttcagtttggcagtcgtcttctttacgcaaaaaacgaccaatgggtttgaaacggctgacttatctggtatggcccaatccgcgggctatttgttagctgcagtggggcccgtactattcggctggttaggcggtcaattaggctggggaccagtactctggttagctatcattctttccgcgttactagcattatccggcagcatcattttccagcatgcaacgatttatgagtaattaatatcacaataatgcagaacgagattggcccaagtcaatttcgttctttttttgaaactttatctttgccttagagttactctaagggattacactaatctctattcaattaaggaggccacagtaatatggcggttattcaaattctaacggtcgtcggcgtggcgatcatcggggcaagccttgtaggtgatcccactcagcaacgacagtcaaaaccagtaaaggagcaaaaataagatgacagtgttaacaacgatgtatcaactagcaaatggtgtcaacattcccaaagtcgcattcggaacttggcagatacctggtggtgaggcaacgtatcaagccgttcgtgcggccttagcagcgggataccggcatattgatactgcactggcctatcaaaatgaagctagcgttggccaggcaattcgtgattctggcattccacgtgagcaaagctttgtgacgactaaattaccggccgaaacgaagtcatatcaaggtgcactaaatgatttcgatcgctcactgaaaaatttgggtttagactacgtggatctctatttggtacacgcaccttggccatgggggcaagtcggtcgagtttacgatgaagctaacctcgatgtttggcaggcaatggaagctatttatcaaagtggccgggcgaaagcgattggtgtctctaactttgctgttcgggatttgaagaatattcttaaccaggcgacgataccaccaatggtcaatcaaattcaatattacttgggcttcacggaacctaagatcaccaagttttctgaggaacatgccatgcttgtagaagcatactcgccgttagcgacgggcggggtcctcgataatccgcaagtacaggcctatgccgataaatacggcgtcagtgtggcgcagttagcgttacgcttcgttttgcaaaatggggtcttgccattgcccaaggctgttaatccggcccatattgaggcgaatacgcaattggacttcgcaattagtgtggccgatatgcaagccttaaacgacttgccagatgcggctggttcatacatgcacaacccaacccaaggttaacgaacaaaatgtttgaccgcacttgggtcgataggagtaaactgaacataattaataaacgataaggagcgatttgatgacaacgattaatgcagctaacgcgggtacttacgcgtttgatgatcaattcaaagttaaccggatgggttatggcgtcatgcagttaacgggtcctgggacatggggaccatacgctgatcctgaaaatggggtcaaggtagttaagaaagcactggaatatggcgttaatttctttgatacggctgattcatacggtccatggtttgctgaccggtacttagcggcgggcttgaaggatgccgctaatcgtgatcagatcttcatttctgataaggtcggtcaaacgcggcaaggaccgaatgtgtggacgccacttggtgagccacggtatctgcgtcagcaagtagaagtttcaatgatgacactggggattgaccatgaagacctagtattcttacatcgaattgaccctcattactcgattgcggatcaagtcggtgaactcaaaaaacttcaggatgaaggtaaaatcaagcatatcggtctgagtcaagtaactgttgatcaaatcaaggaagcgcagcaagtcgctaagattgatgccattgaaaatctctataatgtcgccaatcacggtgatgatgacgttgttgactacgcggcctcacaaaagatggcttttctgccatggttcccattagcaacgggtgaactggctcaggctgggagtgtcctcagcacgatggcccaaaagtatcaggtgagcccagcgcaaattgccttggcctggctattgaagcggtttgataatatcataccgattccaggaacaagttctattgagcatttacgggacaatgtggcagctgccaacgttgatttaacaacggccgattttaatggattaagtcaattaagtgttaaatgagtatttaggtcgggaattcccgacctttttgtttgcctaaaacgagctaaacgacgcttgaaattcatggggttgacggttaaaatgaataaacattgaatgagaaagaggattgagcaaatgagtacgcgtttgatgagtgatgagccaacaatttatttagcaggaccttggtttactgagggccaaccagaacggctagctaagatcgaaaaattaatggacgagttagaattgacttattacagtccacggctagacggcatcgatttgacgccggatgcgaccgaagctgatcgaaacgcggtatttacggacaatgtggaccatttaaaacgggccaagttagttgtcgccgtggttgatggctttgacacgggaactatttgggaaactggaacagcatatggtttagatatccccgttgcttactatggtgaaacgttagctgatggcacgtttaatgtgatgctggctaagtccggcaaagcggttattgagaacatgactgatttgaaggcttttctacaagatcccactgccgatgattttcaatatacaggaactattcgttaatttgaacggttagtcaaaataaaaagcgagccgtctgcatttgtcaaggctcgctttttgcatacataaatggcagaacttgtggtgggaatgagccgcttgaaaaaatgtaatatttgttaaaggcaatgtgtttaattggagaaaagtcatcaaatggtgttacgctatgggcagaaattggttgactagcgcaaatattaagaaagcggcaagaaaacaaaaaagttcagttcaaactagacaatcactatccaagttgtataatgtacttgtaagcgttatcagaacctaattacctattttgggggcgttatttatggttaaaagtaaagcaattatgattggtgccgggctatcaaatatggctgcggcggtctacttgattcaagatggtcattgggatggtaaggacatcacattctatggtgttgatatgcacggtgcgaatgatggtggtgccacgactgattttaccaatgagtattggaataagaatcatccgatggctaacacgactgggtatgttgcccggggtggtcggatgctgaattaccggacgtacgttgacttaatggatttattggaccggattccatcggtaactgaaccggggatgacggcggccgaagatacgcgtgattttgatgcgaaacatcggacgtatgatattgcccgcttgatgcagggtggtaaaggcattattaatgctggtaagttaggattcaataataaggatcggactttgctgactaagttgatcatgatgccagatagtgaagaaacgaagctcgacaacgtttcgattgctgagtacttcaaggatgatccgcatatgttccaaacgaatttctggtatatgtgggaaacaacctttgcctttagaacgcaaagctctgctcaagaactgcggcgttacatgcatcaaatgatttatgaatttacacaaattgaacacttagttggtgtcaaccggacgcgttacaatcaattcgaaagcatgattttgccattaattaagtacttgcaagggcaaggtgtgactttcattgataataagattgttaaggattggcaatttaaagacacgccaatgcaagacgaaattacggtgactggcttagtcattgaggatgcgcagactggcgaaacggaagaagttgaagttgatgaggacacagcggtgatcttcactaacggttcaattaccgattctgcaacgatgggtgattacaacacgcctgctcctgaaaatatggattatggtgttagtgctagtttgtggaagaaggctactgagcggttctataacttagggacgccagataagttcttcaacgatcggaatgctagcgaatgggtcagcttcacgttgacgactaagaatcatttattcttaaatgaaatcgttcggatcaccacccaggaacccgggaatgcgttgaactccttcttatcaactacgccaattacgccgttgaaccaaaaggatgttaatatgtcgatcgtggtgcaccaccaaccacactttacgacacagcaaccaaacgaaacagttctgtggggctacttcttgtatccacggcgtcaaggtgagtttgttaacaagccgtatatcaagatgacgggtaaggaaatggctcaagaattaattggtcaactttccaaagtagatccgggtccaggcaatattaaggacaaggaaaaggaaattttggacagtatcgtgaacaatattccggtatacatgccatatgcttccgcactctttaataaccgggctaagtctgatcggccagaagtcttaccaaagcactcaacgaacctagcctttacgggtgaatttgcggaacaaccataccagatgatcttcacggaacagagtgcggtccgctctggtgagattgccgcttatcactttgctggggtcccaatggataacttggtcaagacaccacggtacgataaggatccaaagaccttgctcaaggcaactaagaagatgtttgattaattaaatgctggcctgtcagtggttaatgctgatgatggcatgatgtaaaaacgctccccatgaaagatgactttcatagggagcgttttagtgtgcatcacgatcagtagtaacggctcgttgagacgccgtcattaacaggatcaggttgctaagcaatttagtggttgatcaaattttagcagctgctttaggtgttaatttagacggtgtgtgtttagtagtggttttgaccgtgagatgctttttggttgcaagtttgggtgcctttttagcgttttgcttggcggtctttttgattaattgtggtgccatcttcttagttttcgttggttgggctaacgtttttttagtggcgagagtcgttacctttttagttggtttgatacttgccttagggtgcttgatcgttagcttcgttgattttgccttggtggtcgtctgctttgtcaatttgattacctttttagatgctttgattttaggcgttgctttcttagcactggtggctttaggtccagcctgcttggtggtcttcttagtaattgtcaacttagtcttcggggttttcttggtcgcttttaatttagcggtcggggcgttccctttaatcatcgtggtggctttagcccagccgagggccttaccgtgttcactaatgaggtaatatgtggccgacgtatgtttgccggttgctaaagtaatcgtcttagttaccgtgtaagtctttttagtgctgagttttgctttggccgggctaacaaaggcgattgcccgatcggcggcaaagtgaattgtattcaaagtcgtggcggccttcgcgtgcattgtgatggcggggaagtgggtcgctttagtgagtgcatgggtagtggcttttggggttaccgtggcggcattagccgtggtggtcatggcaaacgggctggcagccaatggtaatgccaaagcaagtgttgcaacgactgatgttaattttttcatttcaaaatcccccttaaagtgaatcttttttgattcgaagatagtttagcaccttgactgctttgcaacaatcgtaatatcaataaaattatcaaaaagtgggtgaatttgaatgcaatcaataaaggcttgataacaaacgaaccgcggtgggagtaaccgttgggttaatgagagtgaccgagattttagaactaacgttcgcactgaatgggaaagttatggtatgctagaacggtatttttactgaaaggggtgggcggcattgccggcagcaacaactttaataacccccgctgaaaatcgtttctttctgttaagtgaacgagctcgacggcggaccacgctccaacaaattagtgcgttattacgcgcacacgtaacggtaaaggctgacagtgatttcttgaaaccgactgtccgtaacttgattttacaagatcatgcacagtggttgaccgactgtagtcatgagtggcaacttttggcgagtctgccgtacgttgttaacccgaatgaaagccgacaagcatggcatcattgcgaattgtgtcataagccggttcgttatgagtaccatgttcaaaacaagcataatcatcgtgagttgattgtcggttctgaatgcgtcaaaaagttcatgaacgccgaaacgcgttacttgatggtgattacaacagaagataacttttatgcggtggcccagtatcagacgctgactaccgctgtaccaacagtgccaacgatcatgtttgctcagccgtggctaccacaattaccggctgagcaagcgccccaagcgcgcaagttgcgacaaacaacgacgcaaaccgtcacgacgtacctaaaacgtcgtaccaagcagctaccattacaggaactaaagcccgctgaacaaacctatcagcggttagtccatgatgaacaaacggtgattgaagcggctgagcgggcggcccgtcaagcaattgtgactaatcaacaacaacgccaggcacaagcgcagcaaagtgctgtgaaggccgagcaaaccttgcgccagagtcacgcctatcaatgttatttacagcagctggcggccattattgtgatgcgtccggaacgaccgatggcgaagcaacagtttgaaaaaatcacgccaccagcgaccgaacgccctttggtgaactcttatcaattcgggcaaatggtgactgaatatcgacagactgggaagattcaagttcggcgcctagccatgcttgatcatcagttcgttgccgcacttaatcaggtgactcaacagctagatgaacaacaaacgacgcgtttttatgacgatgtcttcaatagttgttggggctggcagtatcatcagcaggcgacccaacgtgcggattgggagcacttattgacgacccggtggggccaatcattgtcgctggcttggtttgaacaattagccatgcaaacgacaatgccacaaactcaacagtggcttgcggacaatgcggatgccggtatgcaagcagcactacagcaacgtttggctgcgcatgaagaccgccaaccgattgcccgtgaccggatgactagatcggaattacgacagttttgtttgcgtgaacagccagctgcgccgacattagaagcatttgaacaggtctttgaccaacagtatcaattgcccgtcgaccggcaagcaacggcccatgaaacgttagcctattactatattgcgcgtcaatatcaaggtgaccatcagcgtgcgttacaacaactgaattggttattgaaagtctaaatgtttcacgtgaaacataaaaacgcccactgattttttcagtggacgtttttaattcggctgacaggttaactattaatgacgctgtgatagcgcgaggctgcaaattcatacagcggccggctaagtggtgtgacctcaacggcttcttcaaatggtgccgtaaccatggtgttgtcagcgtttttagcgagtttgacggcccaagttggatcataaagtaattgttggcctactgcgactagttcggcagtttgtaacacagtcttgacatcgtcgcgggtccggacgccaccaacaccaactagtggcaatttaccttgtaacgcttcgtgcacgtaggtcatgatggatttatcttgatactgcgggtctcgtgaaacacggtcatagttgttgagtgagacatgaacgtaatctaatcgactttcccgtagttgtgagagtaaccaaagggtatcttcaagccgaatacctggttcttcgaattcttctggtgagaaacgatagccaacgatgaagggccggtccgcatattggtcaacagctgcaaagacggcctttaataattcatcaataaagcggaaccgttcttgcggcgtgcgaccaccgtattcatcggtgcggcgattactatgtggtgagaagaactgttggatcaaataggtattggcaccgtgtaattcaatcccatcaaagccggcttgaatcgcgcgccgagttgcttcaccgaatgctgaaattgttgcgtggatctcgtcaatcgacattgctcgcggtgtttccgcatcgtcacgaagggccgcaacggcactggcagagacaatctgttcgccatttaagacggctcgatgcgtcattcgaccggcgtggaagatttgaacgatagctttggcaccttgactttgaatgccatgagcaagtgcacttagaccgggcagcatcgtgtcatgtgcgatactaagctcgccatgccaacccttaccgagatcttcgacgttggcagcacccgtaatcacggcacctaagccagtagctcgttgtgtgtagtagtcgatttcgtcatgggtgatactaccattgtaaaagctttgagtcgtcgtcatgggcgacatcattaggcggttgcgtagtgtaacgccagatttgaatttgagtggttcgttaaaactagtcacaataaaacatcctttcaagctagttttgcttactttttgtaagatctagtttcagtttagcggttgaaatttgttttttcaattttaaagtcgctggttttagttaatcttggcataacaggatggtgcgtgtggaataaggggattgttgctgttgttaagtcaggtgaggcttgataggtagatgcaaacaaaaaacttcatcgataagcatggtcgacgaagttttttggaaaattatgatgcaacgttatgccttaaacggattccagaaacggccaccgttgaccttaaagagggcgatgccgaggatgatcagcagagcaactaacgttaacgccagatagtcgttacgtttaaagcgttgggccatgtaccatgtgcgatgttttcccttaccgaagcgccgcaattccatcgcctgactaatggtttcgattcgatctaagcttgaaaaaatcaatggaagcagaatttgaatgccgccacgaatacgggtcataaaatgcgcttttttcgacatttcaaacccccgagcctgttgtgccagactgatagtacggtaatcagcttgaacgtctggaatgtaacgtagtgcaatcgctacggaatagctgatacgataagaaattccaatcttattgagactcgcagcaaattcgctgggattagtcgtcatgagaaaaatcagggcgagtggcacggcaaacgtgtactttaataacaaattaaattcataaaaaagttgttcggctgtcaagttaaagtagtgatcagcagatcccagtagtaagtgttcggtaccataaatcgagacgccgtaatgaggcgcaaagacgtacaccatcactaagtttaaaacggaaaaaccaataataacgttaagcacgaacgcgatatcgcggtaatgaatttttgaaaagcggaatagaatcagtgaaaaaatcatcaccccgattaagtaacgcgtgtcgtaagtcatcatcccgataactgataagccaacaaagcagagtagtttagtgctaccgctaagtcggtttaaaaaagtatgacggtcgttgtacccgatcaataattcatgttgcatcttagcgcgcctcccgttcagcctgaacaaattttgcgacgaattctgtcgggtttaaatggtgcgcttctgccagggtgtataaacttgtcttggctaaggaagcttgctgaataatggatgcgttggtcaacacatcggctgggcgagcatccatcaaaatgttgccgtggcccaacacaatcgtgcgatccgtgtattctagcattaggtgcatatcatgcgtgatcaacataatcgtcatgtgttgttcctgattgatcttagttaagaaggtcatcatttcagtatagtgttgcaagtcttggcccgcagtaggctcatcaagaattagcatggccggttctaatacgaggatggccgcaatcgtgacccgtttcttttgaccgaaactgagcgcagaaataggccagtggcgaaactcatagagaccacagaccttcagaacggcctggacacggcgctttacttcatcgtcagcgacacctcggaggaccaaaccggcagcaacttcatcaaaaatcatcgttttagagatcatttgattggggtcctgaaggatataaccaatttggtcggcacgttctttgactgattggtcagctagggaatggccgttaaatcgcattttgccggactgtggcatcaaaaacccagtaatcagattgcttaatgttgacttaccagtcccgttttgacccactagactaatcatttcaccctgatgaagtgtgacggtgatatcgttgatgattggtttggcgggatcgtacccgaatgtcagatgctcaattgcgagtaacggttggtcatgaacggtgggcgactgtagttgtacgccggcggtccagttttgcaacgtcgcggtgaggtcgggtacttgtaaggcttggaggttatccaagtgttggcaagttgctagatcaacaccggctagtttgagcgctgaaaggtataatggttcgcgtagcccgagttgagtcatgagtgattgccgcaaaatcgtttccggccggtcgttagcgacgatcgcgccgtcttgcatgacaatcagccggtcgattggttgctgtaacacgtcctcgatgcggtgctcaataatgatgacggccaggtcctgcgtatgagtcagctgatcaatgagtgccatcgaggctttacccgatgccggatcaagactcgctagcggttcatcaaataataggattttactattgtcgatcagaacaccagccatggcgacccgttgcttttgcccaccagataattcctgcgggtggtgagtcaataagtcttggaggtctaaagtttgggcccactgttcagttgcttgtcgcatggccggttgggtctgctgatcattttccaatgagaaagccatatcttcgacgacagtcaaaccgacgaactgactatcaggatcttgcagtaccgtaccgacgtcttgggataatgcaaaaatggagctctcagtaatggtttgaccagcaatccttgcttggcccgtcactgttcctggataggattgtggaatcaagccgttcaaacaccggcctaatgtagatttaccggagccagaaggtccagcaatcaacactttttcaccgggataaatatccagattaatatcacgtaaagttggttccgtttggctattatattgaaaagagaaatttttaaagctaatgatgggtgcgctcatgttattaacgttcctttgttaagctcccacgttgggtccgcgtccgggcgtacaagactagtaggatggtcccaatgatggcaactgagatggaatcggcgatccaagtaatgacaccttgaaggtaaactttgttggccggttcatgataaataataatatcaccagttggtgctaaaagcacccaaccaataaagttgacgatgatttggtaaatgttaaaccagactaattttgccgttcctagtacgccattttcaatcttgagccgatttttagctagtccgaaggcaaccccaatcagaccatcaacgatgacccaagtccaccaaggcgaaccataagttacgaagtcgtttaaggcgtgaccgatgaacacggctaaaccagctgcaacgggaccaaagatggcacctagtaaggctaaaaaccccattgcgacgttaacctgggtattcggcacacccgttggaatggcgacaaatttcatgagaacaaaaataacggcggcgccgatcccggtagccacgacggtacgaattgaattggattgcttgttttgcatagtgtaacactccttaagtattgagaatgaataagttctaataaccattaataaaagcgaacaggcgttaatttcagatcagttatggtcataaaaaaacgcgcctaaaagcgaatgctttctaggacgcgtttgcgtgttaccaccgagattttcccacagggacttatcatgatcgtaacggatcgctccgactgagatggccccagtagcttcttcaagaccatcttcaactaaccacgtcatcgttttgcaccaaaaatacgactctctaagcacgagaattagcttactcatcttgtcacagctttttctaatctgaatttaactattaaagcatacgccaaagtctgtgggggtgcaagtaaaaccgaacggatgtagccggttacatcgagattgaacgggaaaatcgggaacagctaattaaatggtggtcaaatgcgctgattcattcggctatacggtcagtgacggatgctgatgattagttggattggtcgttaattaaacaaagccaataaaagtatatacaaatgatttcaattagctactaaaaggggtaaactagttgacaagaccaaatgatgaaggggatgtgagtagtttggcttataagtatgaaacgattgcggatagtctgcgacaagacataaaatccggtaaatatacgccgggcgaattgatgcccgaccagaataaattagctgaaacttttgatacgacacgaattacgattcacaaggccattcaattactgattattgaagggatggtttactccaagcgtggcgcggggacctttgttcgcaaggactttggcttgactgaacggcgccaagaaacgctggtagacaagccactgggaacaacgcaaacgaatgccggtaaaaaggtgacgagtaaggtgttggaattacaagctcgcttgcctactaagcgggaagcggaacagttgttaatcgatgagatggatccggtgtacgttattcggcggacccgctacgttgatggcaaggtgtgggcgtatgagcatacgattatgccaacgagtatcgtgacgttgacgaagcaagtcctcgaaggctcggtctatggttacttagagcaacatagtggcaagaaaatcgcgggttcacaccgtattatctcggcagcccgagtgacggctgatgacgttgccgcaatgggcgcgactctgaatgatcccgtgttggtcattaatcagattagttacatggatgatggtcaaccctttgaagtctccgaatcacatttcccatacgagacaagtacggtcgtagcggatgttcaaattcattaaagcaatcggtaaccgcgttaatcagtggctaccgattttttgtggaaattattctggggagttgcattcaagaaaacggtggcccataattaaattgattgaaaaagaaagcgcttcaataatctgattaagggggatggaaatatgccagctaacttttatcaacgattaattgataagtatgaaccaatgacggaagcagcgttcttagtgttagtcagtgttcgccagccgattaccagtgaagcgattccggcaaagatcgctgaaatgaccaataatcaactacagctaggattgggaaccttatttacgaatttgcatgccatgacgaaggattatttaatgacggaacgagtcgatgaaaatgacgtgcatacctatgaaatcacggggagtggtgaatcggttttggcggctgaacgaaaacgactgcaattattgaatcagatttgtgagcaggcgggattgtaatgggttaatttaacggggaagtgagtatatgtggcgttatcaaatggcagtcaaaggctcagagcaggaattgcggtggctcaatcagcaggtacaacgcgggcaattactgcggcgtatcagggggaactggtatcaatttcaaaaaacgacgacgcggtatcaagtctttagtgaatatgtgagcggtaatgttgcaactgaaatcgacgaccagcacacaccgttcaaattgttagcacggctacaattgacgaaaccagccgtacaggtgatttatacgggcacggctcagactgagttgcagggggcgcgagtggatcgtcaggacgcaccgttgcagttgaaaattgcactggcgcaacggggacacttgttaaatgtcatgaatattaggttagtggttggtctgatactggccgtgatcgtgattagcctgaatgtgagtgataacgtggccagttggggaatgctagcatggttgctatttaccttctatcctgcatggcaagcaagtcggctgcataaacaggcgaatgcgctgcgagtcattacgcaacaatatgatgatgcttggcggccaacgatgcacgttttcctgaaaaacatgtccaccgagctggatacagaaaaagtggctggtctaggggcgtgggcttacgtcggtcaagatcatcacgggatgtactggtacgacttgaagacgctggcaagtgctgcggaaatcaagcaatcgctacagccgattgtgggagatagcgtttctgtatcgattgtaagttggctgggattggcaccaattggatttgtttaaacttttaaaatggaagtggtaggtatgtggcggcatcgatttttgatcaaaggttctgaacaggagttggcatggctgaatgcgcaagcacagcgacgctatttattgatggctattcatggaaattggtatcagtttaaaaaagtgccgacgatttatcgggtctttagtgagtatgtgccgcaaacaatcgcggctgacatgagcaacagtaacagcacgtttcaagttctcgcccaagtgcaagtacagcaaccagatgttcagattgtgtataccggcagcgaccaaccagcattacagcaaacgacaatggcaccaactgatcctaaggttcgtttggaagtagctttgcagttacgtgatcaggcgatgaatacgatcaacctcagtctttatgcaggggttgtggtatggggattgtttttgatactgatccttcatcagggtgatacagatttaataggcgtctggatgctactgctgttagtaggacttctcgcggtattaggactgtatcggacggcacatcgtttgcagaatcaaatcagccagttacggcgtgacactgaacagtatgacggggcctggatgccgacgatgcacgtttttgtgagcgcattgactgctgatcttgacaccgaggaaccggcattaaagtcgttaggccggtggaccttagttggtcatagtaaaaagggccagtattggtatgatctgcaaacgctagccaatgcggcagaaatcaaacagactttacgaccgttcgttgcgactgacactaacgtcaacgttctgagctggttagggctcgcgccactgggctggtttgtgtgattggcaataattgtttgtacaattaacatataaaacgttagactattctgagactaacgttttttttgtgtttaccggtctgatgataatataaatgataaaaagtgacatataatcgtaatagtagtattctaaataaaagacaaagctggaataggttgagtgttagttaatcagctggaaattaatggatattgcgcgaattttactataaaagtttttttatttgtcacaaatatttcatataatcgggttaacttaaatagtacaagctcgattgtgttgaagacaattgagctgattacacagaaagcttagtgaggtgattttgatgcgacttaaggatttaactggtgagactttcagccgtttgaccgttatcgaacgggctgaaagtgcgccgaatggtaatgcacggtggttgtgtcagtgttcatgtggacgacaagtagttgtcgatagttatcggttacggaaagggattacgaagagctgtggctgtttacgggcagatgttagtcgaaagaatatttttgaaaatccgcaaacccgtaaaaatatgggacgtagtgataacttaccgctttatcaaggaacttcggtcgatcgattgaaaccgaatagccggaatcggagcggggtcattggtgtttcctttgaccgatgctcacagaagtgggtcgcacggttaatgtatcggggccgcttagttttgaatcagcagtttgctgatatggatgatgccatcatggcacgtaagcaagcagaacaacgctacgttatgccagtgttagaagaatatgcgaaatcaagcgcggattaaggtgcgtacataattagcatgccaggagactggtgtgctttttttgcgattattacccgggaaataaacgagttagattaatacccgtgaggaccgattatttgtgtttattgatcaaactagttagacttaacgagcaatttaaattagaacggaggaactttgagcatggaaatgggattagcagggaaacgggtcttggtcactggttcgactaagggaatcggacgggcaattgcggtagcatttgccaaggaaggcgcggatgtggtcattaatggtcgccgcacagatacggtggcagcggttgtggatgaactcgcagcggcatacccaacaactcatccagtggcggcaccgtatgatattagtgatccgcagcaagctgacaaaatgtttcaacaaattccaacggttgacgtattggtcaacaatatgggaatctttgggccaatggcttacgatgagattgacgatgcaacttgggaacgcttctttaaagtgaacgtgttgtctggcaatcggttggcaaaacattatttacctgcaatgttagcccaagattttggacgcattatctttattgcgagtgaagaagcagttatgccttcgggggaaatgccccaatattcgatgactaaatcgatgaacctttctttagcgaagagtctgtcgaagttaacagttggtagccacgtaacggttaacacggttatgcccggctcgacattaacagaaggtgttcagaaaatgttagatgatatgtatgctgattcagatttgccaaaggatcagtgggagcatgactttatgattaatcatcgaccactatcacaaattcagcgtttgattcggccggaagaaattggtcggttagcagtgtttgtcgctagtccgtttgctagcagtttttcgggtgaagcattgcgggcggatggtgggttagtcccaactatcttctagtggctaatgaagacgatatatctttctggttctgccatcgaaattcagatgtcacaaaactgttttagcgagtaaagtttatcgccaaaacagtttttttgttgacttgactagcctaagaagccagtttcaagcggattagatgtttaaaatgaaatttttaactgattgactggctagtcattgacttattagtcaacggcgcctatgattgcagcatcaacaataagatgctcgaatttgaaggatgggagtgagtcatatggataaagaaccgttattaaggattaggcacttgcaaaagcatttcgggaagtttcaggctctcaaggatattaattttgaaatcaacgcgggggaagtttttggctttatcggtccgaatggtgctggtaaatcaaccaccattcgggtactacttggaattttaaaagctagtggtgggcaggcgacgatttttggtcgcgatgtctggcaggatagtgtggcgattcataagcgaattgcttatgtgccaggcgatgtttatttatggcctaatctaagtggtggggaaattattgacttgtttcttaaactaaacggtggtcagcatacggctaagacggacgcgctaattaaacaattcgaactggatccgcgtaaaaaagcgcgcacttattctaaaggtaatcggcaaaaggtggccttgattgcggcactctcaacggatgctgacctatatatttttgacgaaccaacgtccggactggatccgctaaatgagcagacgtttcaaaatgaagtattggctttaaaacggcgagagaagagcgttctgttatctagccatattctgtcagaagtggaaaaaatgtgtgatcgcatcggtattatccgtgaggggcagattgttgaaacggggtcgttagctgagatgcggcacttaacccgaaccacggtcgatgtgcaaacacgactgcctttgactgacttgaccaccctagctggtgttcacggggtcacagcgcgccacggagataaccacgtcagtctagccgtcgatgctgaccagttgacgccggtagtgcagtacttggcgagtcggaaactgatcagcttaacaacgaccccaccaacgttagaagatttattcatgcgctattacacgaccgaacaacaaccggtgaaggggaagtgatgctgatggcaacacaactatttgctcgtaccggattactgatacggttcaacttacgacgagattggaaaaagttgctcatttgggtcgtcgtgttgacggggctattcacggccatcgccgcgaagtttgatggtatttatggcactcagatggcactgaatgaaattgtcaaaacgcttaaaacgcccgcgatgatttccttatttggtgcgttttcggccaaatcgccatatacgacggccaaggtgtttgcaactgaaatggtggtttttatggccatcgtcatgattgtgatgaatatcatggtggccgtggttacgacgcgcggggatgaagatgatggcctgctagagctagtgcgtgcccacgcggtcggtcggttagcaccactattcgccggggcagctgagttaacggcgctaaatggtttgattggttttctttttgccctcgggctgaccgtcgccaagcttccgggagcgacgacgccaggtaattggttaattggtctgggcttagggggcttaggctgggcttttggaatgttgacgctgttacttgcacaggtaatgactagtgcgagtggtacgacgatgctgagctatttgctactgggcgtcatgtacgttgcacgaatgggcacggatgttaaccgtccagacctgacttggtggatcccctttggttggattgaaaaattagatgcgtatcaaaccaatgattggttaccaatcggtctgtatgtattactgggtcttggttgtttaagtttggctgcagctcttaatgcttatcgggacttgggcgcgggcttagtcgaaccacggcgcggtcggcgacaggctagcggtttattgcggggtcccgtgaccctattatggcggcaggcacatggtctgattattgcatggctactagggaactttatcttaggtgccgcgtatgcgtccgtctttaatacgattggcgatctggcaaagagcaatccaatgatcaaacaactgctaggtgcgtcagctttagcagcagcgaatcgcttgatcgtcaaaaatttcattgctgtgttggctatcgtcatggtgatcgttgcactggttccagcagtacagttaatgctcaaactggtcaatgatgaacaaaaaggctatctacatcaagtttatgcgacggccacatcacgttggcacgtgtgggcaagctataccggctgggcaatcgtaacgggactgctcgttttacttgccggtctaagtggtatgtatttgatgggcctgacgagtatggtcaagcccatcagttgggtgacctattggcacgtgtttgcggcctatgcaccggcgatgttagtgatggtagcggtgacgagtgccttagcgggctggcgacctaaatggcggtatgctgcgtggatctgggtattttacgccttcttctcattgtatcttggtaatttgattgatttgccaaaatgggcacgccgtttaacgccccttggctttgttaacaaggtaccaatcaagcccttagatggaacgacaagtagctggtgcctattattaactgtgctaatattagtagtagcagcactaagttatcggcggcgtgatctagctcagtaaacgaaaggagtgcgtgacatggcagtaaaacaacctgttcctaaagacccggcgaaggtcgagcgtattatgcacgcggccatgcacacctttgccgtcagtggctatcgagatgctaaaacggatgtgattgcgtccgcggcaacggtgtctaagggcctattatttcattattacggtagcaaacagcgcttgtatttggccactgttcagcttgctactgacacgattattgccaccattaatcaacaagtttttgatgttccagatgacctagtcacgttgatggtgcggagtgcgcgttacaaggcggcgtttggtaaagaccacccggatgaaatgaaggtcttgattgacgcctatggcgcgctggagcgcttgccggtaaagatacaggcacaaatgaagatcctgtatactaagtcgatgactatttcccgggaaatgatcagtcaggtgctggataaaatgacgctgcgtgcggatgttgatcgtgatgcaacgattgctttgattatgggtgtttacaatcagatttttatggaatttcagacctatatgcgtgagaatcatcaagttgaatcgatggccgatatcgaatgggtgatcagtcgcgcaaaaacctacatggggattttagaacatgggtttatggcggcggatttagatgaccagcagtaataatacgtatcttagacagccgacggatgtttaatccggacgactgtttttcgaccggtggattcggcagcgtttaatagtgataatgtttattcgcttttttcgttagcaggctaaaaatgtggtaagttagacttaatagatgacggatgaagtgagggatcggaatggaattacatttaacggcacgacagacgggattgtggcaacggttgatggcactggcacgtgagcaattgatgggactcgccatgcagatggagtcgactgggaaagtcgatcgaccgacactgacaacgcttgcccagcaattggctttggacgatccactaccagatgaccgcctgagccaacgggttttgagtacattagcgctggcgcaaagttcagctgggctcgctatgagttttgccagtagttggcaagttgaggatgcaatattaacgtttggaaccccgcaacaacgccaacggtattgtgcacaatcaggtgtttttggactcgcggcattaccggaacaagtcatggctagtagtaccgtcaaagcaacgccggtaacagctggctggcaactgtccggtgcggttaaaacggtattgaatgttacacaggcaactgagtatttagttctcgcacagacaccaccgaatgctacaggggcctttgttattagtgctgatcagccaggcgtcacggtcagccaaccaataacccctttagggttacacggattgaccatcgcggatgttcaactcaccgatgtcccggttacggccgctgatcaaatcggtcaattgggacaaggacaacgagtgatgcaacgggcgcaaagcttggggcaattatttgccggggcgattacagcgggaatatggcaacatgccacagaccaggcacgacagttagcgctgacagaacagccgccgttaactgccttggcgccagcaatggcgattacggccgccttacagactagtgtctacaatgcggcccaacaggccgatgatgagcgcccatttacagacgcagcgcaattggcggcaatgtttgccagccaaaatgccttggcgccgtttaaaattttgatgccattgatcggtgatctagcctatacgcaacactcgccgttaagtgccttgcaaaatgacgtggcgacactaccgttgattgttggcacggatacgcaattggcgttgacttttgccacgacgagcctgaatgacgaagtggccgatgtcccgacaacgggaccccacacagctcctgagcacctagtcgtggccgacctacatcgggtcgtaaaacgcttgaatttgactagggatgtgccagtcaatgtcggcagtattgctacggcgaaacgcgtcgtggcattaggtcgaggcgcgatggaaccggcagtattgcttcaagcccaacaattggccaagtggattggtgcagcattggctgttacccagccgctaacggctatggaacaatttagcattgagcaacaaattggtgcctcagcagtgacggttgcaccagaagtcttgatcaacattggcgtcgctggtgatgatgattacttggctggcatggctggtgcgcaacacgttctttctgtgaatacggatgaacaagcgccaatcttcaagcattcacaacaaattttcgtgggcggtgccgctgaatttttggccggaatggtggcagcattaaattaatacgaagtcgagttcggcactgttggtaggtctgacggggtcgtatgacaatcaattgtttgcacaaaaactaagggtcacagcaatgtactgtggcccttggttttttacttagctttaaattaagtaccaccagtcattacttaattaacgaaataattaatgaccaccgtcacttaaaacgtgcggtgagctggttcagaatcggaatcttaaatagggcaatcaagataactgagtagcagacgtaggttatgacttcttgtatcatgcgcgttgttagcaaaactgaccatggtgttaagtacatgagatgaagccagaggctgtttaaaaacaaattgagaataaagacgacgataaagttagcgacgagaacgcgcgtcagtgaagtttgatgttgaaaggcgtatccaaagactaacccagtcagaaaagcggttaggataaaaccaggaaaaaaggtgaactttgggaagagcagcattccgagtagggaggaaatcgcgctactgccggctgtaactagtggtgaaaataaacgggccgttaaaccaataataataaacgcgaaggatatcttggttagcaatagttgaattgacagtaaactccctaagataagttgcatggcaattaaagcaccgagtaacgggatacgccgaaccgtgagtgatgatgtcataataattgaagccccctaagtgtgttgaatgtattttaggggaatttgttgagaattactagacctgaaattattggttataagtaatataaaaatatcgctaggagaaacgctatgacgttatgtagcgtttctcctagcgatcaattaatccggaatatggctcccgttggacatgggttgcagttatcgctacaatgttgataaaaggcagtatggaggcgtttgaatggcatacattacaaaaaagaaaattgcacaagcctttcatgacgtcgtcctagtgaggggctttagccgaacttccgtgacggcaattatgagcaccgccgattttagacggcaaacattttatgattattttcaagataaatatgaattattaacctggtttattgatgacaccctgactgaaacggttgaacataatctgaattatttgccttggatcgacattattaaactagtttgttacgagttagatgcgaatcgtcaattttatgcagaatgtattaacacgcagcatgaaattgacgtgacggcacttgtcggtaaccacttagccacgttattgactgaactaacgcacgccaatacaacagaaacggcggccctaatctggttgctgtgcttgggaatcgcacaatcgttaacgcataatatcgttgcgaatcatcctgaagattatgaggtgctttctcagcacgctattgcggccatcgaaatgacactcgaaattttgaactagttaggccaagcagcagttttgacgggtcggtttagagcagttaaccagtcagggtcggctaggctgagtaaggttaatgacaacccatgcatcccgttagcagttaaaaaagttcccactttgttgaagtcgattgttagtgcggctaaggtgagtaattcgtgaacatcattattgaacaccatgagttccatgggcgttgtcccaccgagggagttaacgaaaacggcgtaatggtcgtcagcatgccacttaaagttgagacgtaatttactaattaattcctgtgcgagtcgttctgacgattgaaaaggttcacgccgataaccgggttccccgtgaataccgataccgtaataaatttcaccaggattcaagttaaacgatgccgttgactgtcctggaatgcgggcgccgctagcagcaaccccaatcgtgtgaatgtttggcactagggcggcagcgatgtgggtcaattcagcgatagaggccccctgagctgcagcggcaccaagaattttatgcactaaaatcgtgccagcaactcctcgtcggcgctgttttaaagattcatgatccacggaaatatcgtctgccacaatacatagaccagtttgccaatgttccttttgcagttgttgttgagcagccgtaaacgcactaacatctgctggaaaatttttaacaatgaaaaaaacgcgacgctggcgtgtcacctgttttgtgactttaacgatttcttgagatgtagggggttgaaaaaccgttcccatgattgcggcagttaacataccaggcccaacataaccccagtgtgccggatcgtgaccgctgcccccaccagcaattaacggaatctgatcatcttgaaagttgctgtcgtaacatccgaatgtatttggtacccatgttaaatttggataggcccattgaatgccctgagttgcttgactcagggcattttgaggttcattaatgatttgcatgggaacaccttcttatattgttaatttgattttattataacgcattcgaatgaccatgcttgtcagaagctggcggacaaaataacgaaactgtccattatttttgaaagcggattcatttacaattaacgtgttaattcgagaaaggaaggacaacaaaaatgaaaaaaataattaatgatcccaagaatgtcgtcgacgaaatggttgatgggttagtacgtgcctatcctcagtatttaactaaattaccggataccgaagcaatggttcgtagtgatcaagattcaatgcagggaaaagttggaattgttagtggtggcgggagtggtcatgagcccgcccacgccggctttgttggccctggcatgctcagcgctgccgtggcaggacaggttttcacctcaccgacgccagaccaaatttatgcggcaattaaggctgtcgatcaaggtaagggcgttttcttagtcgtgaagaattattctggtgatgtcatgaatttcgatatggcgaaagatatggctgaattagatgatattcaagttaaatcgattgtcgttgatgatgacattgctgttaaggatagtttatatactcagggtcgtcgcggggttgccggcactatctttatgcataagatacttggggcggccgcggatcaaggcgttgatttggatgatttagaaagtttagcaacgcatgttttaccacggattaaaacgattgcggtcgcattatccgcagcgacggttccggaagtcggcaaacctggctttgaattggcagatgatgaaatcgagtttggcgtcggaatccatagcgaaccaggttatcggcgcgaaaaaatcaagccatccaaacaacttgttcaggaattgctaggtaaattagatgatgaattacacctacagtcagatcatcagtatgcgttcttggttaatggtatgggagcgacgccattgatggatcagtatgtcttttgccatgacttgttggatgaactggcaacacggcacattcaaccggcctttatgaaggttggtaattatatgacttcgattgatatggccggtatttcactgacgatattcgatgttgctgaatctcaatggctagattacttacagtacccggtcaaaacaatcgcgtggtcataaggaggaattgagaatgttaacagttgagaacacaacagtatggctgaataagtttgctgatcagattgaacaacaccaaagttacctaagtgaattagatacgccgattggcgatggtgaccatgggggtaatatggctcggggcctagcagcagttaaggcagcacttgccacgcaaccagcagacataactaaactatttcaagcaacggcgatggcattgattagcaaagtcggtggtgcttctggaccattgtacggaacagctttcttagaaatggcaaagcaaagtaagattgatagcgatttaggtggattgttggccgctgcattagctgggattgaaaagcggggtggcgcgacaaccggcgataagacgctgattgatgtgtgggcgccggttgttcaggcggtccaagcgggcgaattgacgcaggatgttatcgatgatgcagttgctagcaccgaaccgatggtggctaaaaaagggcgagcatcctatctaggtgaacgttcagtgggacaccttgatccaggtgctgtctcgagtggttatttatttacaacgttactggatacggagggaatcttatgagtttaggaattgtagttgtttcacacgtcccagaaattgccgcaggtattcagcgtttgttagggcaagttgcccaggacgtttcgattacgattgctggtggtacggatgacaatcaagtcggaaccagcctgaccaaaattacacaagcgtttgatgcaaatcatgcggatgaactcttggccttttatgatcttggtagtgccaaaatgaatctggaaatggccattgaaatgagtgataaaacggtccatttatatgatacggcactcattgagagtgcctacacggccgcatcgctattacaggcggctgtgccacttgcggatgtcgaagctcaattagcgccattaaaaatcaagtaggatggtgacgaaacatgcacggttttttaggtgaatttttaggtaccatggtgttaattgtatttggggttggtagtggtgccgccatgaatttaaagggtaattatgcacgccatcagaattggacgtttatttgcttggcgtggggcctagccgttacgtttggggtctatgttgccggacaatttggttcggatggtcatctaaatccagcggtgacagttggttttgcgttattcggttatttgccaatggctaacgtttggccgtacttattaggccagttcttaggggcctttatcggcgcggtaatcgttattattcagtactacccacactttcaagctgccaaaacggcggcagatggcaatcaagttggcatttttgcaactggtccagccatcagtaacccggtatttaattttctaagcgaaacgattgcgaccttcttctttatcttcgtgttgttgaatctcggtaactttacccagggattaaagccattgatggtggggctgctcattgttgtcgttggtcagaccttgggtggaaccacaggctttgcgattaatccggcgcgtgattgggcaccacgattagcctacacgattctcccggttcctaataaagggttggctaattggggttatgcctgggttccaatgtttggtccattgcttggtggtattttggcagctggtctggaaacaattattagttaaatactcacaactgtgccgattttgttgggcgcagttttttgttataaagtataattaaataaataatgcaagtttatgcaatcgcttgcaataacgatgaaaacgttttatatttaatgagatggattcaaatagatcggggggatcatgatggcaacgatcaaagatgttgcccagcgcgcaggtgtttcgccttcaacagcgtcacgtgcaatgcatggtagcaagattatcagtaagccaacacgtgacaaggtcattaaagcggcgcgggagttaaattacgcgccggattttaatgcgcagaatttagcaactaaggctagtaatacaatcggggtggtactaccagtagatcatcacgaaatcttttctaacccatttttcttagagatgattcggggtatcaatgaagtttgtagtaagaatggcgcaatgacaacgctagcaacggggatttcaagtgatgaactggtgcataatattgatgtcatgattgcacaaggccatatcaaaacttttattttactgtattctgaaaaaaatgacccagttgttgagcgcttgaagcaatttgatgtccaatacgttgtgattggtaaaccttaccaagacgtcaataaaacatcgtatgttgataatgataatatccaagccggaacggatgcagcccaatatctaattgatcatggacaccggcgcattgggtttttgtattcggatttatcacggatggtgcaaagtgatcggatgcttggctatcaacgtgtaatgatgcaaaatcagttaccaaatattatgttggaagaacggtttgagactcatgcggcgggtgttaaaacactacataagttttttgaacagtatccagatgttaccgggtttgtggccgtagatgatatgttggcgttgaaattacaacaggttctccataatgatccgaactggaaagttaaacaattctcactgattggttttaataactccattttttctgatttagcgcacccgatgctgacatcgattgcggtctttccacagcgtttaggtgaagaagcggccaagattgcgatggctgaccatcctgctgatgaattatcaacggcagtaattgtgcctcatcaaattgttaaacgccattccgtccaccaaatcaagtccttacagtagtaagttaggggggtattttgattatgataacgctaaacgatgtcgcgaaaaaagctaatgtctcaaaaatgacagtttcacgagtcattaatcatccggaacaggttcgtcctgagcttcgagagatgattttaaatgtgatgacacagctagactatcatccgaatgcggcagcgcgagcgctagtagggcggagaacccgggttgtaaaattaacgatttttgaagacatggacacgacggaaccctattacatgatgttgctcgcggggattgcgaatgaattgaatcaacatcaatacgccttgcagattgcgacgcgcaatagctatgaggttggcgaatgtgatggctatattttgactggtattcggcaagccgattacgcatgggtcgaacgtcttaatcagccagtcgtctttgttggtagcaatcgtcagggatacgactacgttgatactaataattatcaggcggtctgggaaagtacacgttatgccgcggaacagggctatacgcatcttgtctttattggtatcgctattgccgaaccgtttgagctagatcgtgaacgaggttttcgagagtacgtcacgacacatcatattagcgctcagattattcgattagccaatcattcacacgttgcaactgcgtatgtgaagagccattggtctggttttccacgtaatacggcgtttatttgtgcaagtgatcggttggcgatcggcgttgaaacggcaattattaatcaaggtggtcgcgttcccatagaatatggcattatcggttttgatggcgtgttattaaatcagattgcagccaaacggttgacaacgatgaagcaaccgcttgaagcaatgggacgagctgctgcacggctattattggctaatatcaaccatactgatcgttctcgcgggcggcatgatcaagaaaaaatcatcattaattcacggttgtcggtggctgaatcgacccgttaaagaggagtctggatagatgagcaagcattggtatgatcaacaaacgatttatcaaatatatcctaagagttttaacgatagtaatcacgatggcattggtgatattccgggaattaccgcgaagattccctatttgaagcaacttgggattaccacgatatggttaaacccaatttatcaatcaccccaggttgataatggctacgatgtttcggattactaccaagttgattcgagcttagggaccatgacggacgttgagacgctcattaaaacggtccatgagcacggcatgtatcttatctttgactttgtcttgaatcatacttcagatcagcatccatggttcaagcaagctctcgctgatccacagagtaagtatcgggactactatttatggcaagatcccgcagccgatggtgggcgcccaaacaactggggctcatttttcggtggcagtgtttgggcgaaggatccggcaggcggcccacagtattatttccacttgtttgataaacggatgccggacctcaattggaagaatccggcagtgcaacaggcgatgcgtgatgttgctgagttttgggttgaaaaggggattgatggtctccggttagatgcgtttattcatctggctaaagcagattttcgccaaacttatccaaatcggactggtgattcgacacccatcattagcgatatgttttatgcccacttaccgaaagtgcatcagtacttacacgactttgtcgccgtaatcaaagctaagcacccggatacgtacgtcgtcggtgaagcgtcatccgctgacccccatttgatggtcgactatacgacaccaggtacggatgagtgtgatcaagtgattacgttcagaacttttgcggacgacaatacccaggatgatccgagcttctccgacacatttcagccccgaccgatggatgtgacggcctataagcaaaatacggtcggtattcaagcggctttagcagacaccagtctaccaacactttactggaataatcatgatatggctcgggtcgccacgcgttacggtgatcctgattatccgcaagcaagtgccaaggcgttagcgacggccctgtatttgcagcgtggcattcccattatttattatggggaagaattaggattaacaaatatccgttatcatgatattgcggactttgaagaccagacggtacccacctttgttgcgagcgctcaagccgctggtaagtctaaggtggaaatcatgcggatgttgaatcaaactcataaaatggcggggcgcggccccatgcaatgggacaatacggtttatcatggtttctctgaccacttaccatggaaacatggtgatactgatgacatgaatgcgcaagcagaaatcgctgaccccgacagtatttatcactattatcaacagttgctgcagctaaagcagtgcgcaccctttactaatggtcagttcattatgctcggaagtgctgaacaactctttacctacctcattgatgatggtcaaaaacaagcagcgatagtttgtaatttaagtgcgcaagcgcaaacgtatctgttgccgtttgttggtggtaaagtgttgcttgtacagggtggtgcaacatataggggacgccaagtgacgttaccagcttggagtagcttagtcgttaaatcggcataagcaatgtgagtgcatgattatcctaaaattggtatatataaatcatgtgatgtattttaattaacttatcaatctttatataaattggtataaaggttgatggaccaataaatcctaacgtttttaagcgttaggatttatttttggtatgattctgttaacgttaacattacgaaaacgcttgcgaaagcgtttgcacagttgcataataaattatggtaaatgaattaagatacttcgcaaggaggaagcactatgagtacttggaaaaagttggggatgggtgccctagccactggtttagcactcacgctcgtaggttgtggtaatagtaaatcttcatctagtagttcaaagatggacaagacgttaaaggtttcagcggatccttcatataagtcatacatgaaatcggtgattccaaagtttgaaaagaagtacaacgttaaggttaaggtttcatacaaggccatgcttgatgaagacgatgctttgaagctggatggtccttccggcaagggtcctgatgttttaatggcaccatacgaccgggttggtcaaatggcgtcacaaggtcaactatcaacagtcaagttgaccagtggtcgttacaacgcaacggggaagaaatctgttacttataagaataaggtttatgcagcgcctgtaacgatcgaatctgacgttctgtactacaacaagaagctaatcaagactgcacctaagaacttcaaggaacttgaaaagttagcttctgacaagaagtatgcttacgctaatgataagactaagtcagttgccttcttgactcaatggacaaacttctacaatgcctttggtgtcatcaaaggttatggtggttacgtctttgctgatggcaatacgaacgccaagaagatgggcttgaacaattctggcgccgttgaaggtttaacttacatgacgaagtggtttacgaagtactggccaagtgggatgcaaaatgtcacttctaacgaaaactttgtgacctcacaatttacgtctaataagactgctgctgttattgatggcccttggatggctgcaacttacaagaagtctaatatcgattatggtgttgctgttttacctaagttgaataacggcaaagattatcaagcgtttgccggtggtaaagcttgggcaatctcaaactactctaagcataagactgctgcacaagcttggttagacttcatctctaacaagactaaccaaaacaagctttacaagtctgctagtgaaattccagcaaacacagctgctcgtaaggaagctgtaagtactggcgatgacatggctacggccgtttcaaagcaatacgacaaggatgttcctttgatcaacttaccacaaatgtcagaagtttggacaccagcacaaacgatggttaccaatgctgctagcggcaagatgacaccaaagcaagctgctaataaagcgcaaaagacgatcttaactaatatctcacaaaagtatgataagtaattaaaattgtaatttaagggggctgaaacaaaattcgttttgtctcagcctttttaaaaggaaaaatgcacgatatttagaatttatttaggaaaggggtgcgggcgacatgcaagtcaaggatgtaaagaaagcgcaacgcctgtcaattattcccgggctcggtcagctgtataacggtcagaccataaaaggtgttggcttcattattattctattggcatttattgctgagttcatcttcgggggctttagcgcatttgccaatttagtcacattgggttcagtctcaatggaagacaactctttgttcatgatgatctatgggacgttgcagattctattgacaattgtgtttatcgtattttatattgcaaacctttacgatgcgaaacacgttgcacagttaattaataatggtaaaaaggtctcccatacgtttaaagagttaggtgcgagtttagtagatggtggctttgcttatttattaaccacaccggcctatattttaatggtttttacgattgtgttcccagtattggttacactactgatggcttttacgaactatgattttgcgcatattccaccagctatgttattggattggattgggttcaaaaacttcacatcaatgttcttcttgagtagttaccgggcaaccttcaacgctgtttttggttggaccgttatttggaccgtatgtgcaaccacgttacaaattattattgggattgccaccgcagtaattgctaaccaaaacttcatcaaaggtaagcgcttcttcggagtgatcttcttgcttccttgggcgattccagcgtttgtatcaattatgagtttttcaaacatttttaatgattcagctggtgcgatcaatgtgcaggtcatcggcttatggaatacgttagttccatttgctcacattgcgccgatccactggatgacggatacgttctggactaaagttgctattattatgattcaaggttggttaggattcccgtacatttacgttatgattactggtatcctgcaagcgattccagaagatctctacgaagccgcaacgctagatggtgcgacagtaatgcaaaagttcaacaagattacgttgccaacgatttttgctattgcagcgccaatctttgtgacgcagtatacgtttaacttcaataacttctcgatgatctatctgtttaaccaaggtggccctggtgatgtcggtgctaacgccggtgggacggatatcctgatctcatggatctacaagttaacaacggggacgtcaccacagtattcattggccgcggccgttacgttgattatttccgtcttagttatcgggatctcattgattgtcttcaagaagacccacgcgtttgaaatgggggactagtgttatggataatgcacaagcagtggcacctaagaatgccaattcaaagcaaaatagcgcgcgtcggcaccgtttctggaaagaattctttacgtatctgtatatggtcattctcggaattattattatttatcccgttttgatcacattcatcacggcgtttaaggatgctaacgtgcaagccttcgtccttgattttggtggtaagtggacgttggttaactttaagaacttatttacgcaaaccctgtatggtagctggtatttgaataccatgattatttcagtctcatgtatggtcattcaagtcatcgttgtgacattagccggctatgtttatagtcgttaccgttttgctggtaaaaagttcagtctaacgtttttcatcgtaattcaaatggtaccaaccatggccgctttgactgcttactacgtcttagctaacatgttgaacgctttggaccattactggttcttgaccgcaatttacattggtggtgggatcccacagaacacttggctgatgaaaggttactttgacaatgttccgtatgatttggatgaatcagctaagttggatggtgctggtaatttcaagattttctggtcaattgtcttaccattagttaaaccaatgattgcggttcaagcgttatgggccttcatgtcaccagttcaagattacctgatggcgaagttcttattgacgtctgaatcacattatacggttgccgtagggctccagacattcattaataacgctcaaaatcaacaagttgtgctcttctcagcgggggcaatcttagtcgcgttaccaattgctgccttgttcttctacttacagcggttcttcgtttcaggattgctcgctggtggcagcaagggttaactcaaatattagtaggggtgaaattagatgcagagtacgaaaaacaaaacaaccgcctttccggtccggttttttggcagcctcttctcacctcgaagaatgtttgccaaccgtgatcagtttaattggttacagattattgttttatttatctttttgaccgcggtaatggtcatgccgattccgttttactataatcaccaaacgaattttaatctgtcaccatttttaccacacattgataaaatgatggccagtgatcagatgcaaacggcaatgaaaactgcgaactaccgtgatcagcggttcaaggatgtcaaacatcaaatcattattaaaactaaggataatgttgctggcttcgatctcacgaacgatgatatggcaggacgcaagaatgtcattaatttacatgctagtacgtttcaagtgaaatcggtcggtagtgaatttaaagccaagtatgtgccaggccataacttaaagacaaacgctcatgcgtttctggttaattcttggtatcaaagcaataaagtgatgattggtctatttatgctcatggcacttggattaattattgtgggggtcaacctgatcctcgtaaatggggcggcgttcttcttattcttgtcacgacataataagatcacgcatattcggaatttccgcgaaggcgttaacttaacgttgatgatgatggggattgggagtctgttagcgatggtgattggcttaattcattttgatgtcaccatcgaattgaccgtgcagtccctcagcttggccttcgttgtgttgtgggtatatctgaaaacaaaattcaaagatccggaagttgaccaaaccatgttgctttaggtcaattagtaagcatagaaatgaggaagattaatggcacgcgatacgcaaacgcaattacgcaatgagatgatttactcagtctttgttagaaactactcagaagctggtaattttgctggcgtaactgctgacttacaacgaattaaggatttaggaaccgatattttgtggctactgccaatcaatccgatcggtgaggtcaaccgtaaggggacacttggttcgccatatgcaatcaagaactaccgtgggatcaatccggaatacgggactttagctgactttaaagcactcacggatagggcgcatgaattaggaatgaaagtgatgttagacattgtctataatcacacttcgcctgattcagtcttagcaaccgaacatccagagtggttttatcacgacgcggatggtcagttgacgaataaggtcggcgactggagtgacgttaaagacttagactatggtcaccatgagttgtggcagtatcaaatcgacacactcttgtattggagccagtttgtggacggttaccgttgtgatgttgcgccattagtgccacttgatttctggcttgaagcgcggaaacaggttaatgcgaagtacccggaaacgttatggttagcggagtcagccggcagtggttttattgaggaactgcggtcacaaggctacacgggtctgtctgacagtgaactttatcaagcttttgatatgacatacgattacgacgtcttcggtgattttaaagattactggcaaggacgcagtacggtcgaacggtatgttgacttgttacaacgccaagatgccactttccctggtaattatgtcaagatgcgcttcttggaaaatcatgataatgcacgcatgatgagcttgatgcacagcaaagctgaagccgttaataacttgacctggatcttcatgcaacgtggtattccgttaatctataacgggcaagaatttttggccgaacaccaaccatcattgttcgatcgggacaccatggttgcagatcgtcatggggacgtgacaccactgattcaaaagctagtgactattaagcaactaccattactgcgtgctgcggactaccaattggcagtcgtagaagaaggtatcgttaagattacttaccgtgcggctggcgaagcgttaacagcctggattccgttaaaaggtcaggtcacagcagttgcgactaagctagcagctggtagctatcaaaatctgttaacagatggtcctactgaagttgtggatggcaagctgacagttgatggtcaaccagtattaattaaatatgccactaatacggcggtaactaaagttgctgaccagtccaattagctgattaatagctttgagtaatcgatcaaaaagcaaccgtttgcgggcgattgcacgtgtaatagtagtttagaagtgagaaaacaagggagtggatttcgatggttgaaatgaatctcgatcacatttacaaaaaatatgagggtaacgataaatattcagttaccgatatgaatcttgatattaaagatggggagttcatcttcttcattggcccatctggctgtggtaagtcaacgacattacggatgattgctggcttggaagacatcactaagggtgacttcaagatgaacggtcaagtcatgaatgacgtggaaccaaaaaatcgtgatatcgcgatggttttccaaacttatgcactatacccgaacatgtcagtctttgacaatatggcctttggattgaagattcggaaaacttacagtaatactgaaatcaaaaagcgagtggataacgctgctgagcaattgggcttaaccgattatctacaacggaaaccagccaatttatctggtggtcaacggcaacgggttgctttaggacgggccatcgtccgggacgcggggacgttcctattggacgaaccgttatctaacttggatgctaagctacgggtcgatatgcggactacgattgctcaaatgcatcaacgcttgaagaccaacatgatctatgtcacccatgatcaaattgaagcgatgacgatggctgatcggatcgtcattatgaatgacggtaagatcatgcaagttgggacaccgcacgaattgtataacgaaccggttaatcaatttgtggctggcttcatgggatcaccttcaatgaacttcttcaatgccaccttacatgatggtcgggtaactgatggtgagggactcgacgtagctgtcccggaaggtcaattgaaagttttaaaggctcaaggctatgaccagaaaaagatgattgtgggtatccgaccagaggacattcatgctgagcaaattgcgcttgaagcgatgtcagattcaattgttaagacgaaggtcgtcgtttctgaattcttaggtgccgaaagcatgttatattgtacagctggcaaatctaaatttactgcccaagtggatgcacgtgattatcataacccgggtgagaatgtggaagttgcttttgaaatgtcgaaggcccacttctttgattctgaaactaaagatgttattcggtaatttcgaacgacggaggagcaacaacaatgaaacgtatttttgaagtagatccgtggcacgtcattagtcatgaactcgtaccgacggataagcgattgcaggaaagcatgaccagtattggtaacggctacatgggtatgcggggaatgtttgaagagcactattctaacgataccctcaaagggatttatatcggtggggtctggtatcccgataaaacccgggtcggctggtggaagaacggttatcccgattatttcggtaaggtgatcaattcggtcaatttcatcaaagtcaatatcacgattgatggtgatcaagttgatttggcgaaggacacagtcagtgactttacgttggatcttgatatgcatacgggaattttacggcgttcatttattattaccaagggtgaaaagcgcgtccaattcatgattgatcggttcgtcagcgttgcacaaaaagagttatttgatgtgcactatagtgttcacaatttgggtgcggaaccggtccaaattggatttatttcgcaaattgatgcggacgtcttcaatgaagatgcgaactatgatgagcagttctggcaagtgctagacaagagtcatgcgattactggtggcagcatgtttgcagaaacgaagccgaataacttcggaacaccgcgctttacgctcggcatgcagatgcttcatgaaacggcttttcgaggtattaacgccccagaaaccgaaaaggcagttacaaatatcttccggggaacgttagcaccggatgaaaccaagaattttgaaaaacgagtcctcgtggtgacttcacgggattacgcggatatggcggcgatgcggactggcttagccgaattaagtgaaacggtcagcacacagtcatatgaggacttacggcaggcccatgttgatggttgggctaaacgctggcagttatctgacgtgttgattgacggtgacgatgcggcacaacaaggcattcgcttcaacttattccagttattctcgacctactatggcgaagataagcgcctgaacctggggccaaaaggctttactggtgaaaagtatggtggtgcgacgtattgggataccgaagcgttcggagtaccgttctacctttcattggcgaaaccagaagtgacggagaacttactggaataccggtataatcagcttgctggagctttccataatgctaaaatgcagggcttggctggtgccttgtacccgatggtgaccttcaacggaattgagtgccataacgaatgggagattacgttcgaagagattcatcgaaatgggtctattgcgtatgccatcttcaattacacacgttataccggtgatgagatctacttgaagactaaaggaatcgacgttttgacggggatttcacgtttttgggctgatcgggtccacttctcagaacggaaacaacagtatatgattcacggtgtcactggtcctaatgagtatgaaaacaacgtgaataacaattggtatacgaactttatggcgcgctggacgttagaatacacgttagcgagtttgaagaaagtggatgccgctaagcgtgcagcacttcaaatcacggatgctgagcttgcaaagtggcaagatattgttgaccggatgtacttcccgtatgatgaaaaattgggaatcttcgttcaacaagatggcttccttgataaggacgtcaagccagtttcaagtattcctgctgatcaacggccaatcaatcaacactggtcatgggatcatattctacggtcaccgtatatcaagcaggcggatgtcttgcaaggaatctattacttcatggataaattcacggcggaacagaagaaacgtaactttgatttctatgaaccgttgaccgtccatgaatccagtctttcaccagccgtccatgccattctagcagcggacttgcattatgaggataaggccgtggaaatgtatgaacggacagcccgtcttgatcttgataattataataatgatacggtcgacggcttgcatattacgtcgatgaccggttcatggctcgcaatcgttcaaggctttgctggtatgcgagttaaggatgataccttagcctttgcaccgtttgtgcctaaagcgtggacccattatcaattccacgttaacttccgcggtcgcttgattaaagtggatgtcgatcaacagggtacgaccgttgaactggttagtggggaaccactgactatcgaacttaatgggcaagctatcgaggtcgctagcaccgtaacaactaagtaaatatgaacgcttgattgtggtctgaccgtacctggccacaatcaagtttccaacctaagaatgagctcaattcattccaacctaacttctaaatcggtccgtatcagctgatacgggcctttttagtgtctggacataaaagagtccctcacttggaaatatcgatttccaagtgaggggctcggctgttctattcaaatagcatcggtagggttatttgagtgtttgcgtcaatcctagcacgtccatttcgtaaatccgaacggcggtgtcagcaacttgggttggtttatcgacgactaaccggacgtagcgcgccgaagtagccgcgaaagtattgagactagtggcttgcgtgttattgtaggtccgggcaacgtccgtgtagcgtttgccatcagtgctgacctgaatggtccaagcgcgggtgttcatatcagcaccttcgccaccagctttggcatgcgctaatttaaccgcactcacagtcgtttgacggcctaaatccagcgtcaaggtatgcggtgccttaccggttgcacaccatttagtatcgagtttcccatccaccgccattttaggtgcttcactactattcgtgtatccggaggcactggtcttggcgttcttggatagtaaggttaaagcgccttgagctttcggtgtaatcgtaatgagctttttcattgtaacgtgccgttggccatccttatttttagcggttaatgtgacgttataagtgccagccttacggtaagtgaccgtggggtttttggcggtgctggtcgtctttgtggcaccgtcaaattcccatttatagctggttgcgtttttggatgaggcatttgtaaacttgatcgtgttaccgggagctgccagggtgcggttaaccgtaaatgccgctttaggtttacgattatccggccattttaaggtaacttggtcagaagcatcgccacgttggttccaaatatcaactggaacgaccatcagattggtctcgttgtgctgcccattccgtttcaacgcgtttaaatagaaattagtcgtgttagtagcccccagaaatgagcgagaaccgtcattgttaacctgataaatttcgtaatgatccagcttatttttagtggtggcttgccaactcaggttgacaccggcgtacttgccttcttcgtcgaaggtccgattatcaatggtgacctggttgacctttttcggcgcggcctgctgcttgccgataattgcgaggcgacctaattgaacgctgtagctagcatcagtctcgacggcactgattttgaggctaaggcctttgattgttttttttgttaactgactaacgtcatagctaacggtcgtccagtgcttgctgagtgtccggtcacccgcgatggtcttagtgcggccgtcctttaaggtcaccactagtttagctgtagatttaccagatgccttagcggttaaactaacctgggtatcggcagtgacgtctaggtccgtggtgtagagtttgattgtgctagcggtgtccttacgcattttgccggctaacttgatatcattgccaccttcgtaggcgtcagtgtagtcaaagctggcctttaacgcattaccattgccattattgattaaccagcggtaagtcggattgactgcttgcagtgagcgattgttccaatcacgtagcgaaacatttttccccttaatgaagtagttatagccattgcctaagctgaaattagtgacaaagggctgtttcgtaatggcactttgttcaaccgcgtatgttgaaacacccggccaatgtgttgaagtagttgacggaatgctacgggacggatcattttgatcattgacccacagagcaccttctttggcttgaaattcgtcaaccgtatcggaagaagcgtgtgtccagtccggtgcgtacaatcctagcgacgtgtatggcacatgttgtttattagcgaatagattccaacgaacgggggtagcggttccgtcagcttgaacatcgattcctgcaaagaggttgtaaggactaatcccaagcttttcggcgcgttcgtgtgactttttgagtaattcttgactggcgagacgcttcttcgtccaccagaagttaagaaacatcgagtcagcaactggtttcatattggcatcgactagataagattggttttctttggtcaatgcgttttgccaatccattttaccatccttcgtcatcgagtcataccacatcaggtctagcttggagccggccttttgtttgtattctttgattaactgttgcattagttgggcgtgctttttgctcagcccattactagttgagctggttgcggtctttccggtggaagccgaatcaaaacttttaacttcggggtcggtctcttggttgatgaaccagccgtcaaacccgtaagctttcgcaaccgcgactagtttatcagccatcggaaaatgtccgtcagcatcttgttttaagaagtcattgagccactttaacttcccaccactaaccacttgtggaaagaaagcggttccaagaacgggcacgccgtttttatgagcagaatcgatgacatctgcggtcggtggcacaatcaaaccttcgcctgccgaaccgccccagtagacgagttggtcaatatactgccagttggagaagacattcgcatcgaacgtattaatcccgcgaggcgcgttgccactagttgaactattcataatggataacgcgacgaccttcatctttgggtcctgggtcttgttaaccgtcggcagttgccatttatcgatccgtttggctagtggaaccgaggcggtgttgtacttggctgctttatccttgctcaactgccatttcagcagttgttttggaaaccagtacggtgcttcgggttgattatccatccccttatcaagggtggcctcagccgtttgacggtaactgatctgctgattagctgactgtttcgaacaagctactaaacctacagcagtcgttatcaaagctagtgtgccaacaatgtagcgatattgtccatgtctcatagcgatatcctcctgtgaactaagcaaaattgacatatccgcgttatgtgagcgatgattgcatgaatcgtaattaaaacgtggcctcgacttagatttttgactaccgcgctctggcaattggcagaaatgcctggaggtcggtgtagggtgaattaagcatgtttacgctaacccgaactctttccagcgagcctaagctgactgcttttgacgttaattattttgcctactttaatcatgactcatgacaaattagctagcacaacgcgtaaaatacaaaaatctatatattgctggtatgtatgatatcggtttcagtgacagatgagtatagctaaattaagggaattcttccacaaattaaactaattgatagggtcaatcaattttgatgtaaggggaatgctgggtttcaacttgcgcgcaacgtgcgaatagttgaggattgttgcggtgccgatacaatttaacgaacgcgaatttttgcgtgatgagtggtatgtagtataataactagctaggaaggtgattatttattaagtataaagttgataatggtgaatatcccagtggtaaggacgctgtggatcccaagcgagttaaatatctgaaattgattagtaagttagcgacatttacgtgtattgcgatgtacgtgtcgtatattccacaaatcatttcgaatttctcaggtgacccagtatcgccgctacaaccactcgtggcaatgattaatgggatactatggactggttacggctggttcaagacttataaggattggcccgttattatttcaaatgttcccggggtggtttttggatttatcactgttttaaccgtatatattcattaaccgaatgacaaattgactgtaaactaaaagtccgctgatacgtttaaacgcgtatcggcggacttttttgcaaggtgttaagcgttatttaaagcagcctgagctaacaataggccaccggcaatgccagaattgttacccagtccagcgggaacgatatagtcatccagtggtgggacttcttcgtagccatttagataggcggcaaacttttcacgaatcatgggaaagagctgccgttgattcataacaccaccgttaagaataattttatcaggtgcgaaggcgacggtgaggttgacacatgcctgtgcgatgtagtcagcgatgattggccagaccggatcgtcgacgggaatatctttcccagctttccccgttcgttttccaactgctggcccagcagctaaaccttctaaacagatgtcatggtaggggcagttggacttgaaatcgtccccaggtaaccggttgagtcgcatgtgaccaagctcagtatgagtgcgaccattaaaaatgtggttctgactaatgacgccagcgccaacaccggtaccaatcgtcatgtagatgctgttagggacgtccttagcgattccaatcattgattcgccataagcggcttcgttaacatcagtggtccagtagagtgggatgttgaagcgacttttaagatggcctaaaaaatcgaagtcaccccagccgggtttgggagtcgtggtaatgtaaccatatttcggatcatcgggattaacgccgatggggccaaatgaaccgataccaatcgcgtcaacgggatgagtcgtaaaatagtcgtctaccgcagtcatggtttcagcgggggttgtcgtggggatcgaaattcggtcgctaacttgcccgttttcagcgcccgtggcacaaacaaattttgtaccaccagcttcaattgcacctaaaagcatagtgtgcctcctgtagttaaaaatgtagtcttatttattaatagtatactcttgattagaaattttgttaacgattacattaactttgacgtaaatgttgcgtgctaggcctgattaaacctgtcagatcgttttatatcgctgtagcagcaactgagctagctgtcggttcagtcaacgcaacgagctgttcaccagcttggacattcgtgactttgagtcgttcaacattagcgtaattggccgtatttgtgacgactagcatgacggttggatcatagttagcggtttttaaggcagcgacgtcaaacgttccgagtagatcaccttgatgaacggtatcgcccttctgaacgttagtagtgaagtgttcaccatttaaattgaccgtatctaatcctaagtgaatcagaatttcggcaccagcagttgttttgatgccataagcatgatggctatcataagtgacagtgatgaccccgtcagctggtgcgacgacctgatcagcgcttggcacgattgcggcgcctttacccatgatttcggctgagaaaacttggtcgttaacttgtttgagactttcgctagtccccgttactggtgcactgataatctcatcattaacattgatgacggtactcgttggtgctggtgattttacttgatcacgatcgtcaccgagtgttcgtttggcatagataaaagttggaataaatgcgacgacgaacgagatgacagcactgagcatgaatgctggaatcgactttgaagcaatcgaaatgaacccgatgactgatgcgggacccatcgccacggacagaacgtggaatagtcctaagaaagctgaagcaattcctgaggcaatcgctgcaaagacaaatggaaatttcatcttgaggttgaccccgaaaatagcaggttccgtaattccgagtaacgctgagaccccggctgaagaagtcagggctttttgcttttggctcttagtggcaaagaaaatagctaaagtggcggcaccttgcccaatgttggccatcgaggcgactgggaagataaaagaacctcccgttttggcgacgttagccaataactgggtttcaatagccgggaaggtttggtggagcccagtaatgacaatggccgagtagagaaggccaaagatgcccatgccaatccaaccagtcgtgttatataagcctactaaaccgttagttaatgcgtcgctcaccgttcgtaagacaggaccgacgattgtgaaagttagaaagccagtgatgacaattgcaaacattggcgtgaacgtaaagtcaaatgcacccttgatatgtttgtggaagaacttctccaaagtagccaaaatataagcaacggccaaaacagggagcacttggccttgatagcctgcttgtgcaacgtgtaaaccaaagacgttccagtaaaccatcttgccggcagccatggtcgttgcaacgctatagccgttaactagtgatggtaagaccatgatcatgcccatcgtagcacccagataggggttgccaccgaagcgcttcgttgctgaaaatcctaagaggattggcaagaaagtaaacggcgcactagccatcgcgttaatcatttcggcgatacctttgaggccagggtaaacttcaacaactgacttcgccataaaaagatgctcggcagtcaaaacgttgtttagtgccattaatagacccccagcaactagtgcagggacgattggaataaaaatatcagataagactttgaggaagtccattaatggatttttcttttgacccgcagcggcaactgccttgatgtcatcgggggtcgcttctttaagacctgttttggcgattaaggcgtcatagactttatcgacatcgccagggccaataatgatttggtattggccgttagtttcgaaggtccccttaacgtccgcgtcgtcatctaaggcttgttgatcaatcttggattcatccttgatgaccaaacgaaggcgtgtcgcacagtgggcggcggcttgaatgttgtttttaccaattgcattaagtacgcggtcggcaacttcttgatgattcataataattcactccctgagtctaaaattattttcaatttaataatgcaagcgctttacagacccaataataacaagtttggaaaatatgtcaagcgtttgatacaaaattggattgcttgataatcttgttaaaaagccgaatttgaaacgctaacatgaaaatataatataaaaatgtcaaacgattgacatatctgtgtaagcggttttataatagtgacaattaagtcgaacgtaaaaaaggagcttatcgtcatgatatggaatcgtaaaacccgttataccccttatgaacagtggccagcaactaagctaccacagctcgttgcccaggcacgccagtctaagtggcggatgcaacatcatattcagcctacatcaggtttgttaaatgaccccaatggcttttcatactttgatggtcagtggcacctgttctaccaagtctttccgttcggtccggtacacggactgaagtcatggcaacacgtgacctctaagaacttggtggattggcatgatgagggcttagcgattcgaccagatacgccgtacgactcacacggcgcgtacacgggtacagcactaccaattgatgatcagttatttattatgtatacgggtaatgtccgtactgccgactggcaacgtgaatcgtatcaattaggtgcctggatggacacggataatcacattaaaaagctgtcccggccactaattgcgcatgctccggctgggtacacgagttcgtttcgtgatccggacttgatccggactgaccacggctactacgcgctaatcggtgcgcagacgactactgagatcggtgctatcttggtttatttctcaaaggatctgaccacctggacgtgtcaaggcgagttgaacgttcccgcaaatgcgcggggttatatgattgagtgtccaaatctggtctggatcgatcaacagcccgtcttattgttctgtccccaagggttatcacaaacaacgaccccgtatcagaatatttatccgaacatgtacctagttgccgatcaattggatctggctcaggcacaattcactgaaccccacgccctgacgcaattggatgacggctttgacgtgtatgccacgcaggcaatcaatgcgccggatggccgcgcgttagccgtcagctggattgggttacctgaaatttcctatccaactgatcgtgaaaattgggcccattgtttgagcttagttaaggaactaacgcttaaagatgggcacctctatcaaaatccagtggcagcggtggatgatttgcggacgacggcgcatgacctagtctttgagcaacaacgggcgacggtggccgctttgaatggcagctttgaactcttactgacggttcccgctgataaaacggtcacggttaacattgctgatcagcaggaaagtggccagctgcaggtgactgttgatgccaaccatggtcaggttatgattgatcggcggcatacggggaattcgtttgctgaagattatggtcagactcgtcaagttgagttaacggcccataagacgataaaaatccggctaatcatagatgtgtcagtctttgaatgctatattgataatggctattccgtgatgaccggccgtttcttcttaaacgctaccccgagtcgccttaacgttcaaggtgacactacggcagttaccggtaaagtctgggaatggcgccaatcagagcatactggagtcgataacaatgaaaccaaaattaaatgatgttgcgaagctagcgggggtctcagcgacaaccgtttctcgggttattaataaccatggctacctgagtagtcagactaaagaaaaagttttcgcggcgatgcgagaactgcattatcagccgaataatatggcacgctcactgcaaggaaagaatacgcgcttaattggcgtcatcttttcagatattagtaatccgttctttggtgaactggtgtcccggattgaaaaaatcttatttgctaaaaattataaggtgattttatgtaatagtgcggatgatccgcaaaaagaacgcgactacctacaaatgttgatggctaatcaggtcgatgggattattgctggtgcccacaatttaggtattgaagaatatcaacaatacggccttccgattatttcatttgaccggtacttatccgacaatattcccatcgttagttcggataattaccaggggggctggctagcaacccagacattgcatcaggcgggggcgactaacgtggctatttttactggtaagtcacacgctggttcgccaacgaatggtcgccgtgaaggatatgaagcctacttgactgcccaacagctaacaccccatgtccatgaattaccgtttgaattgacccccgcgctgaagatgatggaaattaagacgattatgacacaacatcagtatgatggtattttttgtagtgatgatttgactgctttactagtgctcaacgtcgcgcgacaactgtcattaacggttcctgagcaattacgcgttgttggttatgatggcacggcgctcatacgtgattatcattctgaattaacaacagtagaacaaccgttagcggatattagcacgttactggtttctctactattgcagcggattgaggatgcgaattgtacactggaatcaaaatatacgttaccagttaagctcatcaagggccttaccgcgtaactaaggagttaatcgtaattatggcagcaacaatcaagtggtggcaacaagccgttgtctatcaggtctatccacggagttttcaagataccaatcatgatggtattggtgacttaaaggggatcacggcccacctagactacttaaagcaattaggaatcgacgtcatttggctcaatcccatttatcgttcacccaacgatgataatggttatgatattagtgattatcaacaaattgcggccgactttggcactatggctgattttgatgaattattgcaagccgcccatgaccggggcttaaagatcatcatggacttggttgttaaccatacctctgatgagcatccatggttcaaacgcagtcgccaggaccgcaccaatcaatatcgtgatttctacttttggcgctcaggtaacggcaaaaaggcgcccaataattgggatgcggcttttggtggttcagcatggcaatatgatgagcagacccagcagtattatttacacacgttttcaacaaaacaacctgatttaaactgggagaatccgaccttacgagagtcagtttatacgatgatgacctggtggctgaacaagggtgttgacggttttcgaatggacgtcattaaccaaatctctaagttacccgggttaccaaatggtccactgaaaccgcacagtcagtttggcgatgctcgagtaacgaacggaccgcgagttcatgaattcttgcaagaaatgaaccaagaagtgttgtcacagtttgatatcatgacggttggtgagacccacggggtgacaccagcggatgcgctgaagtatgcgggcgctgatcggcacgaattagatatggtctttgaatttcaacatctgcgacttgataatagtcagcatggtcttggtaagtggagtacgcgtaagacaccgttagtggcgctaaagaaagtcattagtgactggcaagtcggacttgaagggcgggcttggaacagcctgttttggaacaatcatgatacgccacgagcggtctcacgttttggtgatgaccgaccagcatatcgggtacgttcggctaaaatgctcgcaacgtgtttacacatcttgcagggaaccccgtatatttatcaaggtgaagaactggggatgactgacgctcattttactgaattaaccagttaccgggatattgaatcgctcaatgcctatcgtgatttagtgactgagcgccaactactatcaccggcagatatgatggcccgattagcggcgcgttctcgggacaactcgcgaacgccgatgcaatgggacacggaggttaacgcgggttttagtgacgcggcgccatggctcacggtcaatcccaactatcgtcaaatcaatgctgccgcagctttggctgatccggattcagtgtggtactattaccagcacttgattcaattacgacatcaataccccttagtgacgttaggttcgtttgagctcttgtgggctgatgatccgcaggtattcttatatgcacggcaatgggaagggcgaacctggctagtttgttgcaatttcacagccgagacactgtcccgaccactggatcaatatctgacgcccacggccaaatgcttgattagtaattatggcgagcagcagccaaataaattacggccttatgaggcttgggtctaccaactcgcataggtatccaggacttggctaattgaggcggtctttgaaatatacccaatcgttacgattagtgtgaattgggttgcttaaaattctgcgatggtcttaataagcgaccacctgactaaaaaactgctttcaaaaggataacttttgaaagcagtttttttagcgcgcgacgaccacttgacccacgtgaggctcatctagtcgttggtgaccttgaatgaagcccgtgaggttaaacggtagttgttcattgatcgtcgtggtcaattgaccagtatctagcaacttgaatagcaattgtaaggcggcctgatcagaaatcacttcggtcggttggattgcttggaaacgaattgatttactggtggctggcaagtgacgggcaaacgaagcgatggtcgcatcaaatttggccattgctaagtcatctttgccaccaacgccatcgatagcgacattgattacgacgtcaccgcggtcggctaacacgtgaactggattttgatgctgatagtcgacgaattggtcgactcccagtgtcgcaatcaagttagcataacggtcactagcaatcgcgataacgtgggcacctaatcgtttggctaactgaataattaacaagccgactgggctgccagcgcctttgacaatcaccgtttggtcggcttggatgtccgcaaagtagcgcaccgttttgtaagcgacaatccctggagtgactaagctgacggcggtgaccggatcaagattagttggcatggtcaccgctagatcgctatctaaacaaacctggtccgcgtaagtatggttcgtgcgggcagccaccactgtcccaacgtccaagtcagtgacagcggcgccaacttgaatgattttcccaatgacatcatgcccaggaatatgcggtagtgcgacgctttggatagtacctagccgttctaagcggtcttcctcggttaggttaacggctaaagttttgattaataattgattatctgttggaatcagctgtgattgtggtagttcttcaaatacggtaggtcccccaaatttttgatacccgtatgcaagcattgtaatccccctcctcatatctaagttcgttagttgacgtggtgccgggatgtgacttattagtaaataaatcatgcagtatcaattgacgaattgttagattgatccaaaacatgctcttgtctaattgtagccagcagtgggggcgaatcacaagcagtaacaattatattccgggattggttcggtcaccgattaaattaaacaacctagttttaaattaaccggcttcgttggctggctgatgcttcaggccccagccagtgaaaccactgataattgagaataccggtgatagtaagctgaagaaacaaaatggcaggtaagctaaggttgataccccgagcgtgttagcggcaaaggccccggcaacgccccacggaatcaggtaattgatgacagttccaccgtcttcaaggactcgactgagggctaagttagccaatcctcgctgattgaaggtcgttttgaacgctttaccaggcaagataacggaaaggtactgttcaccgacaaagatgttgacaccgattcccgctaaaatcgcagccgtaacagttgccccggcacctttcaatcgcttagttagcggcaccattgctgtctgaatgaggttgaatttcattagtaaaccgcctaacgacagggttaataggattaaggagaccgtgctcatcatggcactgataccgccacgtgagagtaaggcgtccaccccggcgttgccagttttggctacaaagccggtttcgatcatcgtggcgatcttagttaaggcaatatgaggttgctcgataaaaatcatgacgatggcaagaccgatattcatcaacaaggttgcaatggctggaattttaagtagggcacaggcaaacatgacgacgagtggcaaggccgcccaccagctgatggtaaagttattattgaggacggtcaacgtcgtttgaatcttgcccaaatggctttgtgttgcggctccggcacctaaaacgacgtagagtactagtgatacgacaaaagcaggaatcgtagaccacatcagattacgaatgtggtcgaataaatctgcttcggcaatggctgcggccaggttggtcgaatctgacaacggtgaagtcttatctccaaaaatggctcctgagatgatagctccggcaatcaaagctgggttgatgcccatcgttgtcccgattccaaagagggcaatcccaatcgttgagataatcgtgaaggcactcccgatggaagttccaataattgcacaaacgagaaaaacggatggaacgaaccactgcgcagagatcagatgaaacccaaagaccatcattgaaggaatgatgccagctgcaatccaaacgctgatgagtgccccgatgagtagaaaaataaaaattgggataatcccagttttaataccatcgatgatgccaccatgaatgtcatcccagtgggcaccgcgaattcgggcccataaaatgatgagggcgataacgagaataacgggggtctgtggtgacaggccgaacttaataacgccaagtcccataattgcaagcataatgagtaaaacgagtagggcttctggtaactgaactgaacgccatttttttgaattaggcataataattaactcctttgaggtcgttaaaccagcagtgaatagcccgacacggactgcttcaacaacggttgtacgccgataatagtgggtgaatataaaaaatcgtccctgttgcattattatgcaacagggacgattgattagaccgtggtaccacccagcttgagccacaatatgactccactcactagcagttaacggctctagttgttatccgccgggcgtacccggacctctcctaccgtatttcatcgagattaacctgatcggttcgcagcacccaccgacttcctgacgcacagttaattcgctacttgaaagtaagattatcgttcgttatttgaatataagcgataatagcatggcgtttttgattcgtcaactaagatatggctagaaacgtgttaggctaacaaataaatagcgataagtgggtacgctcaaatgaccgacaatggtagaatggttagtgttgtaagcggtaccttttatggttgaccgtgacaagttttttaaagcaaacttttttagggggataatcatatatggctaatcaatggtggcaatcagcggttgtttatcaggtttatccacggtcgtttcaggattcaaatggtgatggaatcggtgatttgccaggaattacacaacggttagattatattaaacagctcggcgcggatgtgatttggctcaacccaatttaccgttcacccggtgtcgataatggctatgatattagtgattattacgatattaatccagaattcgggacgatggctgattttgatcaattattaacaacggcccatgcgaaagggttaaaaatcatgatggacattgttgtcaaccattcatctgatcaaaataagtggtttacgacgagtgcgcaaagtaaggataatccgtacgcggactattatatttggcgtgatcctgttgatgggcatgaacctaacaactggggtggctttttcggtggctctgcttggaaatatgttgccagccgtgatcagtattacttacattcatttgcggttgaacagccagatttgaactgggataatccgcaactacggcaagcagtctatgacatgatgaatttctgggtcaataagggcgtggacggtttccgcttggatgtcattaacttgatttccaagcctgatagctttgcagacgggcagccagaagctggggaaccatacgcggcaatcggtggaattattgccaatggtccgcatctccatgaatacttacaagaaatgaatcagcaagtgtttgcaggccatcaactgatgacggtcggcgaaacgcctggggctacggttgctgatgctaagcaactggcaagcggccaaggtcaggaattaaacatggtgtttgaatttgaacacatgggcctggatggtaatccagatccggcgctaggtaagtggaatgaccagcccgtccgactggttgacctaaagcagagcttgtctaagtggcaaatgggcttacaagggacagcctggaatagtctctattggaataatcatgaccaaccgcgaattgtgtcacgattcggggatgaacggccagcttatcgggaacgttcagccaaaatgctagcgaccctattgcactttcttcaagggacaccctacatctacgaaggtgaggagctaggcatgacgaatgcccattttaccaagttaaccgactatcaagacttggaatcactgaatgcgtatcatcactttgttgatgacgaacaggtcgttcaacctgaacagatgttaggttatctcgcccatatgtcgcgggataatgcgcgtacaccgatgcagtgggatgatagtcagaatgctgggttttcaacggcaacaccgtggctagcggttaatgccaattatccgcggatcaacgcgcaactcgcgcaacgaacgcccggttcagttctgagctattatcagcggctgattaagctccggcaccatttaccagtcataacgacgggaacttatcacctattatcacctgatgatgcggccgtttatgcctatgtgcggcatatggggtcgcagcacctgctagtaatttgtaactttactgcggcaacccagacgcgacactttgcagaattacccgctgatgcgcatctgttgatcagtaactacgatgaagatcatcaagacgtattacgagcgtacgaagcgaaagtttaccagttttaggtcacaattagcttcgctgctggagtcgtgaatgtgatttttaacggcggttgtgtgattacgagcacgagttggtcgtgtaaatttaatcgtgatgacttaaccaaaaatgcgccccaataagaacgcccaacctatcattctagataagttgggtatttttattggagcgcatgtatgattatgatcaagtttgtggttaagatttttgttcggcattgtcagccgcaaatgttttttcaataatgtcgataacttgtttgaccaagccaattggaaattggtgggcccgacgaatcaagttgatatgcacgctaggaacctgaacgtcgtcgaacggaatctcaacgagaccatcgtcttcaccatcgttgggggtcgtgatgtcggaaatgaagcctagtgccaggttctctttaactaattccttgatcaaggtgctgctatcagattcgaagagaacttggggttcaatcgaaagttgttcagcaagttgccggaagactagtttatttaagtaagttgcattaagcagtacaaaaggcgattttagcgcttctgcaaaagtcgggtgctcagcctttgctaaggggtgcgcaacattagcgagaatgcgaaatttaaaaggccgtaatggcgttactgctagccgttcatccaatgtttgatccaagttaccactgatggctaagtcgagttggccggctaaaacctgtttgacgagttgattagcccccatttcaaccgtgtggacgctactaagcaaatcttgctcgatgattggttttgttaatgccggtaaataatgttcactgacggatggttcgataccaaaccgcagtgtatgttgacgcaaatgactgattgattcattgacatgctgccagttgttgataatgtcgttggctgcgagcaatagttgctggccactaggtgttaacaccagcgccttggtctttgcttggcgaaagaacagtgtcacttgaaaatgacgttctagtcgtttaattgcttgggagattgtgggttggctaacgtgaaaatcagcagccgtttgcgtataactctgagtgctgattaagcgttggaagtaatacaagtctttaatgttcatgaaaaatgtagcctccataaaatattaatgttggttgcgcaattaatagtcgcaggtaagcaggctccgactgattgattaaagctggttattatacgtcatgttaatcataccattgttataacgaatagtgtcaggataattagtgaaaattaatttacaaaatagttaacgcgcttaaactataatgattattaataagaatgttagtgctgattggtacagatgtagtgttgctggtaaattaagttttgagtcattatataattttatcagttaaagggctgccacatcgttttgattatcatgacgtgtcggttggtctgattaatcaccggaaaaaaaagttgcattgcttaagtgggagtcgttagaaataaaggttaaagtgttaaagcgataagtaaacattatgcagattaaaaagcatacaagttaatgacaaactattagtaataaagctataaaaaatacttatcagttaaggtgctgttatatatcgctcgataaatcaataattggtctacgtgtcatcggtagcgccagtctgccccgtttctcgacgtaattagttgacaagcaactaaagcagttaatgggtttaaattataaatgaaacgaatgacatcatttttactgattgcaattagttaaatctatattaatcagcataaattattttaattagctaacaactgtcacgaactcgtcaaaattgatggcatacaacttttgtataaaatattataatactaattatgattcatgtctttaaaatgttgatatatcggtaaattaattaagtgtacataaataaaaattatataggtgtaatgagccttttgaacaaatattgctggtatgtaactgctatctgtgagcgacgaattttgacaaaaagtgtcttcaaatttgcggaatgtggtttataattaaggcgtgtaatcggtttaaaagttttaacttatataagaaaggggggatatcatgcgattaatcgatttcaaaacttggataatgggaacggccgccatgttgacattgattgtgacaaatcaaacagtgagtgcggcggacacagctaccactgccactgaaacgacgcagacttctggctcgagtacacttgctaatcaagtggtgttgcgacaaactactagcagtagcagtagcagtagcagtagcagtagcagtagcagtagcagtagcagtagcagtagcagtagcagtagcacgaaagcatcggcaactggtgcggcgactgaaacggcgactagcaaagcggtcaccacgtctgagtcatcaacccaatcatctagcacaacggctactagccaaacgacttcaggtgtgacagccgctcaagcaacaacggacagtactgatacgacagcgatgtcccgggcgacggctaatgccaaagcggatcaacgagcggctagtgcgaaggcgaacaacgagcaagcaacgacccagaatcagcaacaaacgactaatatgtacagtggtgttgttaccagtcaaaaagactcggcgagaacggcaactacgacggatcaagcaactgcgtctgtcgcgacactgtccagaatgagccgggccagtcttcgcagtttagcacaacgggcaacggttgcggttcaggggctcgatgctactgacgcaacggtgactgacgatgatggtgttacgtatagcgctacggatgtattgagtctgtatgcgaactatatcgcgaagtatcattggtcaatagccgatgatgttagcgtaactgctggcagtacagcaacggtgaccttacccgagaatgttgtctttaccaatggtacgcagcatattgatgtccaaaaatcagatggaacggtcgtcgggacttttacggccgagaccggtagtcaaaccggaacactaacttttaatgattattatgcgactagtgatcgttataatcgtcaaggagacttaacgttttatgttactgggactagcgcaaccactggcagtagtacgactgggattaataaggttggctgggccgatagtaatagtttagatgctgatggtaatcccaccaaaatgatctggcaagttgtcgcaaacattaatagtgaaaagtggcagcaagttgcgattgttgatcagctgggcctttatcaaacgcacgaaggtaccatgacgttggaaactggtcattatactgacggtgcctttgttaaagacgcggcactgggcacttatgattttgcaacgcagcagtttacctacgctgatggggtatcaacaccacaagtaaccgtgacggttgtgggtcagcagatgacaattaatattgaccaattagatgtagcggtcaatatattttatgaagttggtctgacagtaggacatacgtacaccaataatgcgggtgtaacgtatgcacctgtcattggagatgcgactgatccaaatgagggcagttcgacaggcgaaccaaagagtgaacaatcgaacgtggccgttagatttggtggttccggaaccgctagtgatgacattcagagttacagtttgttcattaataaaactgatggtgacggccagtcagttgctggtgccacttatcagttagaggatagtacgggtacggtacttcggaccgatttggtgactgattcagttggacagttacgcatcggtaacttgtcggctgggacgtacatgctgggtgagacggcggctccgagtggctaccaaatcgacacggccaagcacgtcttcgcggtatccgcagcgcaagcaacggctaacgtggtcacaggtagtgtggttgacaaacgaattgctaagacggcgctgactgttaacaaagtttgggctgacgtgccagctggagtgcaaacgtcgaccgttgaagtgacgttgcaacgcaatggtcaagcttatcagaccttgcaattaacgtcagcaaatggctatacgggcactttcagtgatttggatgtgacggatgtttatggcaatgcgtacacttatacggtgattgaaacggccattgctggctatatcagtagtcaaacaactagtggtgagacggtgacattaacgaatacgtatcaaaccgggaaattgacggtgattaagacggattcgagtggcgccaatcgcttggccggggcggtttttgccgtgaaaaatgctgccggaacgctggttgctcagttgacaactgatgcgactggtcaagcacagcttacaggtctaacgcaaggcgcttatacggttagcgaaattcaagcaccggacggttacttgatcaatacacaggcgcaagtgcttgtgttgaatgagcaaagcgcttatcaaggccaattagtttttgccgatgaggtcgaaccaagtgaaccgagcgaaccaagcgaaccgagtgaaccaagtgagccgagcgaaccgagcgaaccaagtgaaccgagcgaaccaagtgaaccaagcgaaccaagcgaaccgagcgaaccgagcgaaccaagcgaaccgagtgaaccaagtgaaccaagtgagccgagcgaaccaagtgaaccgagtgaaccgagtgaaccgagtgaaccgagtgaaccgagtgaaccaagtgaaccaactgaaccaagcgaaccaagtgagccgagcgaaccgagcgaaccaagtgaaccgagtgaaccaagtgaaccggtgctaccaggacacgctgacgaggatagtgattcagatcaggttgtcacaacgaagactgagacagctaagttagtcaagcaaactaatttagtaaccacgactcggccaacgaaattgttaggacagccaataaaattagtagcaacttctaaaccagttgttaaagttacaaaagcaactaatcgcaagtcggcgcaacaattgccacagactagtgaacaatcaatggattggctaatgattttgggctggttcttgctagggctaacagttgttagtcgtcaacggcgatttaattaaacaaaaaggctactggaatttcgcttccagtagcctttatttatatcatagataagtgtcgccacattatcgacgattttgagatgtgcgttggtcatgcttaattctgactggttgggcagcgggaacacgggcgccagccacgacgccggcaacggcagctagtccggctgcggccaataaacctgctaataacatgggcaagacctcctcaatagttgtaaaaactcgtcttttaatacctgcagtttaggcgacttattaacaaaaatcaattatttaaccgtaaattagtgagaatctgaataacttgaaatattcttaagtaattgccggttattgttcattctggcaagggcggccgcatcatttaaatattcatgaatttgatccggttcatcggataattgagcctgtaagaatttgatccgcgctgcgtaataggtaacgtggaatcgcgcacaaatctcaatcccgtagtttaataactgcaaactccgcggtgtatcattaatgttagcgtaaaaagcccccgtgtaataagctaagttaatcacgcgccaaacactagcggtcgtttctagcggtaggttcggtagggcgtggcgtactttttcaaaatagtactgggctttatcgttatcctggttctgctgataagcaatcccgataccacagtaggccagctgtgtatagattgtgatgtgagcctcgtccaaatcggtgatgatttggtcaaaattaaagatgacatcactgatcgggtggtggttaagggcagcaacatagccttttagataacaatattgtaatttggtttcgcggtcatgtcgtggcatatccgcagccttttcaagttgtacttcggcatcttgatattcagttgtaatgaggtcgaactcgacctgttccaaaatcttcaaaacagcggcatcagcgacgcgttcggttggaaagacatcttccaattgtaggttgagtcgctgacaaagttgggcaacgattcgtatggcaggtgctttgccattgttctcgaacttacttagtgtcgcctgagtacaaataccatctgctagggccttttgtgaaagtcctagggctttgcggcgggcgatgaaaagctcaatgttcataccatcaacgcttcctttacatatttaagtcataattgaaacagctttcatttaccctaattaaaaactttttatataattttgtcaatatttaaacataatcgtgcatattctaaaaatatatcttgactatataaaaaacgctcgctagtctttgctagtgagcgtctgtgagttagctgatggtttattttgccatataggcgtctttgaagttatagttggtaccagaagtgttataaatcaggccctttaacttagggttgaccatctgtgccagcgttgtttgagttaatggtgcaacgccttcatccgtcccaataattttttcagctttgcctagagcagtccagcgtactgtcggatcagttgcttgctcggcctgcttgacagcagcgtcataatcagcatttttccacttaccaaagttgtaatcattcgtggaagtgagaatgcctaggtcagagatggggtcggcgaagtcagcttgccagccagaaatagcgagttggaaattacccgatgtttcacgtgcaagtcggtttttgaatggcaaggtaatatcggtaatcttcaaaccgggtagttccttttctagctgtccctgaacatattcggccgtctctttggtttggtcaatattatcgtgcgtaagcgttaaggttaatgactttttgccggtttcttttaatccttctgcccacagtttcttggccttagcggtgtcttgagttgtcgccgcactaactgcattttcagtagcgaaatcttcaccagtcgttggatcggttgcgagcccggtggtgacaaagccctttggaactgctgagccatccgctagtacgtccgtgacaagttggtgccggtcaatagttaaggacatcgcttgccggagcttggcattagctagcgcgggcacctttttctgattaaactcgaggtagttcagacgggatgtcttacggagcactaacttgggattattcttttcgtttttgacttgttcgccgctcagggtggccatgtcgagtttgttgctctggaataagttgaatccggtcgtggttgacttaacgacttggtcattgatcttttctaagtaaacgtgttttttatcccaatatttaggattgcggttcagggaccatgtcgtattagtgcctttccagcccttcatggtaaacggcccatcgtagaccatcttggtggccgttgtcccatagtccttgccgtatttctgtacggcgtgttggttctgcgggaagaagatggcaaagcccattaggagtttaaaataagccatgggtttatcaagtgtcacggttagcttgtatttaccgtcagctttaattcctaaactattggctttagctttaccattggtgatttggtcggcattcttgataccagaataaagataagcatattgcgaagcggtcttgggatcgatggttcgccgccaactataaacgaaatcttgagcggttacgggatcgccgttgctccacttggcgtctttgcgcaatgtgaacgtataagtttttttatctttggaaatgacagtatgggtcgcaatgcccggtgtgattttattattattgccaatacggtagaggccctccatcgtgttattgatcatattggcactgatcgaatcggtgactagcgaagtatccaaagtcgttagttcggagccattttctgaccagttcaagacttgcttttgtgccattcccgcgcgtaagttccccgcattatctgacttggactgaccttgactacaggcagctaacaaaaggccggtcgatgcggccgcagtagcagttgtcaacattactttccatttcatagtaaaacttccccccaacttgaatggtcacgagaatacattaaagcaagattaaaatcaatgctttgattctaataattaaagtaattaacagccgcaaaatgtgtcaaggaacacaaaaaaagtaccgtagtttgttgctacgataccttttattgtgcgatttaagggtagtttgacgtgaggcgatgctagttaggtcaccttatttggccatataggcactcttgaagttatagttaatgcccgccgtgttgtagactaggcctttcagcttagggttgaccatttgtgcgatgacgttttgtgagagcggtgcgaccccttgatccgtcgccatcgtcttttcagcggttgcgagagcttgccaacgcttcgttgtactggttgtactatttgctgtgttgatagcactatcgaaagtcttgttggtccacttaccaaagttgtaatcgttagttgatgtcatgataccgaggtctgaaactggatcagcaaagtcggcttgccatgcggagatgaccagctggaaattacccgcaatttctcgggaaattctcgtcttataaggaacggtgacactttgcactttaagtcccggtaactccttttccaattgtccctgaacatattcagcgagggccttcatctgatctgtatcgtcatgagttaacgttaaggtaaccgacttcttgccggtttcttttagtccttgtttccagagctttttagctttggtggtgtcctgagtaacagctgatttaaccgtattttcggtggcaaagtccttaccagtcgttggatcagtagcaagtccggtcgtaacaaagccctttggagtgacggaaccatcgccgaggacatcgttgaccaactgcttacgattcaaagtcagtgacattgcttgacgaatcttcttattggcgagtaactgcaccttcttttgattgaattccaagtaatttagacgtgaagacttacggatgaccagtttgttattattcttttcgttcttgacttgttgtccagataacgttgccatgtcgagcttattactctggaagaggttaaaggctgtcgtcgtcgacttcacgacttggtctttgatcttagttaagtaaacgtgttttttatcccagtaattaggattgcgcttaagtgtccaggttgagttggtccctttccaaccagtcatcttgaatggcccgttgtaaaccatcttgctggaactggtcccgtagtcctttccgtatttttccaccgcgtgctggttttgcgggaagaagaccacgaaacccatcaataatttgaaatactgcatgggcttttcaagtttgacggtcagcttatacttaccatcggccttgatgcccaaggtactagtcttggctttgccgctgacgattttgtcagcatttttgataccggaatataagtaggcgtattgggaagccgtcttcggattaactgtacgacgccagccatacacaaagtcttgtgcggtcacttgatcgccattactccatttggcatttttacgcagggtaaaagtataagtctttttatctttggacacggtcgttttagtggcaatacctggtgtgaccttactgtttttacctaatcgatacaaaccttcttgcgaattactgatcatcgtcccactgataacatcagtggctaaggacgggtcaagggtggtcaaatcctggccgttttccgaccaattgaggacttgagtcttggccattttggccgttgtgttgccggcattgcttgaactggatgaggactgaccacagccgacgagtaaaacgccggtcgttgccgttaacgtggcaactgtggcaaataatttccattgcatatatgtaccccctgcttcaaatgattatgatatgtagatgagaatacattaaaattagattaaatacaatattatttttttaatcattaatattattaagcaaataaagccagtacgactcgttaagaatcgtactggcttaattaagaaaactaacgttgccattgcatcgtatattctggttgctgggttgcttggtcactagcctgatcaatgacacggaaaccgtgatagtgataaaaggcaatggctgggcgattagcaacatagacgtttaattgtaattgatgatggtcagcttgggcagtcgccaatagcgccgtccccagaccttgatgttgagcatcattgcaaatgaaaattccggcaatgtaatcgttttgtaagcctataaagcccagaatataagcttcaggtccgtcggtcagtccgacgatgagttcggctgattgtaatgcttcacgtactaagggggcttgttgacgccagtagtcggcactgacaaagtcatgggccgttaaattaccacttaaccagattgtcattaactgatcgagttggtgagttgtcgggtgttgtaagtgttcaatcttcattcgacgctaccccgttttaatagtcgaacgcgactcactgccggaattttagacagttcagctattaggtcggcttgttgtggctgctgtaggtcgtcgacgtcaatgatggtgtaagcaatctggtgcttagcggcgttagccatggtagtgatgttgaggttggccgctgctagtttggccgtgatttgactcaccatgttaggcacattttcgtgaatgactgtaaagcggtaagccgcgttgaacgggacgtttaagtctggcagattgatggctgcatgaacgttaccggtttccaaataagtcatgatagtgcgcgcagcttgtgtggcaccgttgatttcagcctcgatagtcgagccgccaatatggggtgtcacggtaaccgcggattggttggcaagctggggttcgccaaaatcggtgtagtagtgggcaacttgtcccgtggctaacgcattcatgacggcagtattgtcaacgatgcccagccgtgaataattaaataattgaacgcctgttggcatggcggctaacgcatctttattaatcagatgaagtgtgtcggcatttttaggaacgtggacggtgacaaaatcagcttgtttgactgcatctggcagcgtggccgctcgctggacttgtttggcaatgttccaagcggcatctgcagatagataggggtcgtaaccaattacattcatgcctagactcaatgctgcattggcaacgagagcgccaacatggccgagtccgatgacggccaaggtcttacccgttaattcaataccattaaattgcgtcttgtcgtgttctgtgcgttgagaaatatcagcttcggtatgctgggccgaataggtcgttgcagctattagattacgggatgccataatgagcaggccgatgatgagttccttaacggcattagcgttacttcccggggtgttgaaaactgcagtcccgttggcggttgcctgatcgataggaatgttgttaacgccggcaccagcgcgcacaatgactttcaacgatgacggtaatgtctcggtatgtaggttgaccgagcgaattaagtaagcatccggatgctcagattgattgagcgtgtaatcagcagtaaacgtgttgaggccggctggggcgatggcgttataggttttaacttgatacataaatatcctccttgattaacgatggtgtgcttcaaaagcggctagatagtcaactaatgcctgaacaccggctaacggcatggcgttatagaggctggcacgcataccgccaactaagcggtgaccctttaggtttaataacccgtgctcacgggcgccttgaatgactgcggcatcgaggtcggcctgacctgtgacgaatggaacgttcatggtcgaacggtcgctggtcttgactggattagtaaatagttgtgactggtctaagaaatcatagagtaaggcggctttagcgtgattgcgagcagtcattgtgctgagcccgccttgggcctttagccacttgagtacgagacccgcggcgtaaatagcaaaaacaggcggcgtgttgaacatcgaatctttagccgcgaatagctggtaatccagcatgcttggcaggttggcgacttgaccaattaaatcatcacggacaatgacgattgtcaaaccagcgggacccagattcttctgagcaccagcaaagatgagcccaaaatcgctgacttggtaaggttcacctaaaaagtttgatgacatgtcggctaccagtggtacttgacccgtaactggcaggcgcgtcatcatggttccttcaatagtattattagttgtaagatgaatataatcgagggattgatcgatgggctggacgaccgttggcagttggttaaaatggttggcagcgctactccccagtatcgtgactttagtaccgacccgtttagcttcatcggcggcgcgttgtgcccagtgaccgctatcaagcaacccgatacgatgatgaggcgccagatttagtggcgcagctgtgaactgtagcgtgcccccgccttgaaagaagagcacgtgatagttgtcaggaatggccattaaatcgcgaagatcttgttcggcatcttgaaggacttgcgcaaataaatcggagcgatgggagatctctaaaatgctcatgccggagtctcgaaatgatggtagctccgcttgaatttgagtgatgactggttgtggtagaacggctggcccagcagaaaaattataaattggcatgaaaaatcctcgctttcagtagtttaatcaaggtaataaaaaagtcctcgcagtcggtttcgactaccaggacggataataacgagattaagcaattccacctggtagcgaatgtcttagcatccgtgctcaggctgatttgcgtacgcaaaattaggccgacacagatgggtgtgtagaccaggaggaactgatatgatgattgataggattagttagaaccatcagttggacactccttcgttaaactggtgttagcaccagtcggttaattgcgttggtattaatttagcaagcacgtaaccatttgtcaagctagataatgagaaaaggctgtggcacaattagtattattaataataatttaatcttggaggcgcacgatgacaaccttttacgtggtacgacatggacaaacagcggccaacgcccaaaatttaaaacaaggcacgattaatacagctgtcacgcatttgaattcggttggcaagcagcaagcgcaaacgttgcacgatacgtttgatattagcttcgcggatcggttgatttgtagcccgcttgaccggacccaggccacggcggcgattttgaatcaaggccggcaactacctgttagccaggacgagcggttattggaaatttcatacggccagtgggatggacaggataatgatcagttgctagcggcctatccgcagtactttgatccacttttacaggacgttttgccaagctacgtggaggttgcgacggatggcgagacttttgagcacgtgcaacaacgagtagcagcatttttgaagacaacagcacaagcccatccagacgagcagatcattgtcgtgacccatggttttaccgtcaaagccatggccttagcgatactaaagccgaccgatccgatgagcttaccggagccagctaatacgagcgtcactaaagtaatggtggatgctgtccatggtcgccaatatttagcatattataaccgcctacctcaattctgacgcgcaatgacttaacgaacgggcgattccgggctacaatagatggtggtttgaaatagccacgcactgttgaaccttatttcaaatcaaagtctaattaggcagcaacagcagacatcacatataaactcctaagtgaggtggtcctagcatttggcgaggatcgcccttttgtatccgcttaagcgtttgatcagtaccaatattacaggcgcggtataatataaatagtattcaaaaattagatgaggtgagtaatgatgacatattcagcagcatcaacgcgctatgacgaattaccgattcgacgcgtgggtaagacggggctacagttacccgttgtctcgttagggctatggcgaaattttggggatgaagcgccgtttgccaattcacgaaaagtggttctagatgcctttgatcatggcgtttttagctttgatttagcaaataattatggaccatcgaagggatcggcagagcggacgttcggacaaattatgcaacgagatttaaagccgtatcgtgatgagctcgtcatcacgactaaagccggatatccggcctggtcagggccgtatggggctttcggctcacgcaaaacgttgatcagttcattggatcgtagtcttaagcaaatgcatttagattacgtcgacattttctactcacatcgtccagaccctaacatcgatttgtatgaaactgccgcggcccttgaccagttggttcgtcaggggaaggcgttgtatgtcggaatttcaaattatgatcgcgaccaaacggcaacgatggttaagtattttaatgagatgcacacgccgtttacggttaatcagtactcatataacatgttgaatcaacaggctcaaacaacgggcctgattgactatctcggccagcataatgcgggcttggtggcatatggtccattagctgaaggattattgacgcagcgctacttacaaggaattccagccgattttccgattcatcgaacgaataaatatttatttgatcaggggactgcagccgttgtcaatcagttgaatgccctgaacagaatcgctgagcaacggggacaaaccttggcccaaatggctttggcttggctactacggtcacaggtcgtcacgagcgtcatcattggtacgaccaatgtcgaccacttgcacgctaatcttgaagcaacgcacaatttaacctttagtgatgatgaagtaaaagctattaccgcgattctaaagtaaattgcattaaaggccactcccccaatatgccggggagtggcctttttattagcgcgtcctgtttattaaggtcaaaaatagctcactcttaggctcgttaggtagactcctgttcttcagcaataatcgccctatttccgacctccggggcggagcgacaattgctggaacgtaaaccgacatcgatttgagcccgaacccgcccagtctcaaatacgagacttattctaagctggcggcttttgaatttaatgacggtcatgttttgaactgagccatagccgtgcgctaacttcaactgaccgaatccgggcaattttaaaataatttgggcgaatgttcggtaacctcggtagttaacggcataattagttagctggtgaaattactgattggtacaagtgaccggcttatcaacgtcatcaaaatgtaatagtttttatcgaacgtacgttctaaaaatgtgctatgatggagctactatttcgatgaggtgatctaatggaacagctgaaaccaattgaagcgtcgttattgcaagcttatgagttaaactgcgtggttcggttaactttaagtgatggtcatcagccgagtggcttaattgcggctgtggacgaccagcagctttttttgaatcaacaagcgggagtcgttaagccgattgcgttgagtgacgtaaccgccattgattttcttaaacagtcttggtggcagcggtaatcctaaaggtcgtatttcgctatgatttcgtgacgacggaattcggtaatagcagtaatcaattcaagtggtaggggctgatccagcggaaactggatggcccctttgcttgttttataggtgattaattgatcatgaaaagtctcaattgcacttggcgttgggtacaagccaaagtgatgtttgaataaagcaaaatggatgacgttttcgtgccaatagaaggtcggcatctggtactttaactgctcttgcgcctctggtaagaccgttgcaatggtttgctgtaaggctattaattgcgattgataggcttgtggtgtgttagcaatataggcctcaatcggtgtcatggtgaatatcctcctggtcacgtaattcagcggctaaagtggcatccgggataacggtgatcgtgcgtgcaggaccactaaaggtgacaagcccagccttagcacccttgggtttacgcatctggccaacggtgagcacatcaacaggtacgcggttcatctgacgacccttactgtaataggccgtcagtacggccgcttcctgcaaggtttgttcactcggatgattactgtgaataaccacgtgtgaaccgggaatttcaccacccgcgtgcatccagtagtaatctttacgggccgtcaatgttaggtggtcgttttgacgactatttttaccaacttcaaccagcacgtggtcgtgcgtgtaaaagcggcggggatgggcgggtgttggggccttagacgagtgtaaaacgtgggtatgaatcgcgcccgcagcaatcagtgtttgcttaagcgcggcgaccgcttgtggatcattagggtcgaaagctgcttgagttgctaattgctggtatagttcggtcttggccgtcgccaaattttgttgaacggtcgcttgaccgcgtttgcttttgtgataacgatgaaaataatcctcggcattttcaataattgattttttaatatcgagtttaatactgagttggtggccttgatagtcgggcaattcgacgaaatgatggtgcccctcgatctggctagcatacgtcttcaataacgtgcccttgagttgcaaatcactgacatcaggcaggtggtctaatgctttagttaatgattcgatttgtttacgcgtgtggtgaattaagtgcgctaatccagtttggactaggtcgacatcggttgtggtcgtcattaattgggttcctctaatctgtaaaagttaacgtcttaataataacatgttctggttagttaacagtggaagattgggactagcgaatgaattaagatgtcaaatgacacgattgaaaaaagttgagcaattttcagaaaagttcggtattctattacatgggagttgattgagaaatgcaaaaaacattaattattaacgcaggtagttcatcattgaaatggcaattatttgctatgcctgctgaaacggtggttgctagtggtctcgttgaacggattagtatgcccggttcaattttcaccatcaagtatggtgaccatcaaaagtttgaaacgacagtcgataatttagatcaaaatcatgcggcgcagatgttattggctgaattacagcgattagcaattattgactcattaacggaaattacggcagttgctcaccgagtcgttgcgggtggcgaaacgttcaagcaagcagttgaagtgacgccagcggtactcgaggccattaaggggcttagtgactttgcaccattgcataatccgatggaggcacgtggtattgagacgatggctcaggctttaccgaccgttaaacagtacgcggtatttgatagtcaattctttaccgatttaccagaaatgaatgcaatttacagtttgccatatgaattgacccaaaaataccatattcgccgttacggtgaacatggtatctcgcatggttacttaaccggtcgggctgcagaactgctggctaagccgaaagatgacctcaacctggtgacgttacacttaggtagtggcgcgtcattagctgccgtaaaaaatggccgggccttcgacacatcgatgggctttacgccattaacgggtgtcacaatgggaacgcgcgcgggtgacgttgatccggccgtattgccattcctcatgaaagctttaaagatcgatgatccgaatgaaatcatgatgatgcttaacaatcagtctgggttgttaggaatctcaggaatttcaccagatatgcgtgaaatccgtgcgcaagaagccacgaatccccaagcccaactagctgttgaaatttttgtcaatcggattgttaagtatgccggtagctatttgacagaattaaaacgggcggatgcgctgatttttgcgggcggcattggcgagcataatgcgaccttgcgccagcaaattattgatgaactgagcatctttggtgtgaccctggatccgaaattaaatgaagcgggtcaagaaggactcatcagtggcgcagattccaagattaaagtgatgttgatcccaactaacgaagaattagcgatggtgcgacaagttgcggcgttgcaaaattaagcttctcttaatttacgactgcaatcagtctgccgctgtatagcgcgtgctatactaactggcaaggtacccatgatgggacttgtaaggagggaagctctcttcgcagagcgcatagatgatcggtttattgattgctttagtaattggtttatggttgctcaaagttatctttaaaattggttttaaaattatcggttgggtgttcatgattgtgattgggttgtttttatttaaaatcgcattatggttaggcctgatcgtcgtggcgattgccggcgttgcattattcggaaatgccaccacgtaatttgaaagataaagatgagcgttgttaaaactagtgtcatcggcacgctagccgtaaaggcggcttgttggaactaaatagtcattgaacaaaaacaggaaatctcagttagttttgtgagacttcctgttttttgagttagattaaagttccgagataaaccatgactaggccaccgacgagactcaagccaaagtattcccaggcgacccgttgatggtggttacggccgagcaacacgagttcgttgatcattgttgaaaaagtcgtatagccacccataatcccagttcctagaaaaatctgccagttgggcggtaatgagctggttaaaatccaaccgagcaataaagcgccggttagattgataaataacgtggcaattggtaacggccatcgattgagaggtagtgctaagcgcatgatgccgtaacgacttaaggcccctacagctgcgccggcaccggacaatccgactaggactaacattaaaattcctcctttggtagccaataggtgctaaggaagtttccagctagccccgctagcaaacccaaccctaagctagcagcgacataacttaaagctaaaacgctatgaccactttgaaacgattgtagcgtttcaaaagtgaaggtggaaaaagtagtaaagctaccaacgaacccgacactcataccgataacaatatcttcagagacgggtaaccgcgctggtaacaagttagtaatcaggctaagaacaaatgctcccacaatattaatcagacacgttatccagaaatgctgtggccaagtgacgagcaaactaagcccctcccggagaccaccacctagcattgcgaagccggtaattgcaatgatctttttcaagctgacacctgctttctgaaagtaattttagtttactgaaaaaacttttaaaaaacaatggttcttgcaaattgaaattaaacatgctaatctacaaagtaacttataaaacacgaggtattcagccaatgcgcaactaattaattctagtaactgaacagagccatgcctagcataggggtggactgtccgttttgggattaattagggtgctggtggaatcaattgccagcgttctcattttgaggacgcttttttgtgccataaattagtccctgcaactaaggggatgcttattaatgacaatgattaatttaaaaaatattcaaaaagatatggcgggacggccactatttacaattgaccgattagtcgccaatgccggggataaaatcggcgtggttggccggaacggtgctggtaaatcaacactggcccatttactgacgggtactgatcgtgattatacggggcaaattatggtggacgagccagtcagctatgttgcccaaatcgcaccgacttttgaccaaagtggtggtcaagctatgctaaccagaattcggcaggctttgagcgcccggccaacaattttaattctagatgaaccgtcatctaatttggatgaaacacatcagcaatggcttattaatcagttacaacgttttcgtgggttgctgttgttgatttcacatgatcggcaattattaaatgctgtgacgacacagacttgggcggttgaacaccaaaaattcaccgcatatgcaggcaattacgcatattatcagacggtaaaagcgcagcaactcgcaactcagaaagtcgcgtatcagcgccaaaacactcatcagcgtgagttactagcagcgcagcgtcaacgtaatgaaaaagcccagcggattcgaaaaggcaatcggcgaatgtcgcaagtagagcgtgccaagacgaaagcgactagggaagctaccgcggccaagatggaacgaacggctaaacgcatggtcgcccgaggacaacgggaaccgcaagttgctaagccctttacgacttcaggctttaagttagtcgcgacagattttccgacgtttacaggtaagaccgtggtaactggtcttaatgtcacattggctgaatatggaaaaacgttgttagcacacgctgactttcaaatcaggccacatgatcgggtcgctatcgtggggcccaacggtagcggtaagaccacattactgcgtgcaattttaggtggccgggtgtcaggattacgattggctccggcggcacgagtcggagtattcaaccaagatatgacagtgctcgacggtaaacagtcagtgtggcaaacggtgcggcaagtcagtcagctaccggatcaaacgatccgtaacgtcatgggcgcgttgggcctgccagcacgcttttatccgcaactggtatcggcgttaagtggtggtgaactagttaaattacagctaattcgtattttagtcggtcaatataacgttttaatgttagatgaaccaaccaattatttggatgtggacgcgctggatgcgttggccgattacttacaaaattatcctggaaccgtaatttttgtttcacatgatgaaccgttttgccaggccgttgctactcgggtattgcaattcgagacgcaccaattagttgatcctgacaaagttgttaaagcgccgcaaccggtagaagctgacttagcagtacttcagttcaagtatgatcaattaatggcagacccgacgtcttctacagctactattcaggcattacagcaacaaattgatcggctgaaagcatgacacgttgtttagccttgaagcattcccaatttccatacacagaaatccttttgaaatttcctttaggtgttaaatcggaggctatcagtttgcgataggtgttaacaaaaactatagtaaaattttagttatattaagttgaaccccaaagattgacataaatcgaattttaggggttcaatttatttatgtgatgtttgctgattttgtgagtaacctatactctgagtcatcataaatttgtttgacagtcgataaatttaaaataatcattatagatcttggtctatttgccaatccggtcaaaaaataatagtccttattcaattgtgatagcatttttacaatggatattattatggtaaaataattcaaatataacatatggtttgtttgaataatcaactaatttattttgacagttaaatggggtgtgccaaaaatgaaaaatggcgatctaggcggggcaaatgctgctataggatttcgacatcagtattatagtgcgattgatgcggtaatggaacatatagatgatgcggactttaaaggtattcgtttagaaggtaaaaatgattttactttggtttttaatcagactaatatttctgttcaggtgaaatccaataatccgactatttggggactaggaaaaatagtaaataagctgccgcttaatatggaaaaatatttgatttatttatcgggcctaactcctagtgtaaagagccttattagtaagttaagaattgtcaaaaatgatcctgaagaattagaatcgttaacagatatttttactcaaaagatgaatcttgatccggaaagaatcaaaataatgtttttatgtgactttagagtttatccaagccatggcgaggaacaaccggccttaggtcgtattgcacaatgggcaagtaaaaatagaattaattgtgatgtagttgcaacgttgaattcacttatggaattatttagcaaattgagcacggagtgggggtttgtatcaactgaaaaattaaaaaaggttatcgaaaacaatcgttatatacccgaattttcagccttggcaatgaaccaggatgctctagggtttaattccgacttattagatgcaattgattattttttaaataatgtaagttcgaatcaaaatacagtgggagcgttaagaaatctaagattattagtggtaaataataatttagacatgagactggctgctagaaatttggccgatgagaatcctcgatatgaaattttacgtgctggagtttctttattcacaagtggaaaaattgactttaatgttaacataaatttggtgccagctcgattattgagctttttgaagttaactagaggaatagctgcacttaatacagatgattattcagctacaattaccgactttgaggatatacagactaataaaattatagtgcatacgaatttaccgtatttgtgtggactatgccaagttaacttaaaagactattcaaatgcaactaagaatttcaaaattgcaagtcgtttgggtagttcaatagtacgtgcagatgcttattgtcaactatttatgttaaagcaccaagaagatcctttttttgccgacttttatgatttggattgtgcaaaagaaattttaccaacatattcacgtagttatgtattagcgattaaacagtatgtgtttctggggaagtttgatgacgctatgcgtgattttagatacctgcaaataaatagcctgagtccaaagacgaagcgtgaagtttatgaatatattgccatagctgaatctcatagcgaaaatatacatgttaaaacagccatggttgactatttgaaaatacttgtgaaacagaatcgttttaagctaaaggaaggtcgcactatagggtttgtttttgttgcggcttattttacggatatatacagagtttacgcaataaaaggtggatatggcttagatatgggacggcaatgtataaaaattgaggcacgttcagatatttacgcatcaaggatcggcttgcataccatcgttccacctgttgaggctcttttaaatcttagtcttagtgacgaagtgaagaatcttgaagagtattatggaaaaagtatatctgacttaactgttgaagaaagacatcgtattgttgattcagcggcttttcaacataaatatggtatttcaacattgcttgttctcgaaaatacagcagatgataacgaaaagcttctaaaatccgagcatataggcgtgaatcacgagtacccaaatataattgagtatgtaggagataatcaggtaaatgccagtattaatcttgaattctattttgaaaaaacgactggaacaattgatattaatgatttccattgtatttttcatattgacagagtaggaaaaagtactcatgagttcaaacggcgtttaagaaagaatgggtttcatcaggtgattatccttattcccgggaacaagaagcaaaaagaaattttattatatttgcctgattcgtgtgttaaaactgttgatcacgactgatatgaaaacattattgttatgtttcaatcggaaatttggcaaaaaaggccggtctgtaaaaatcttcggattatgacagaccggtctttgttatggagactgtatgttacagtctcgttttaatttagtttctgtttagtgcatgctgccagctagcgccacggaatgacgaagacgccgacttgtaaaagcaagacgccgctaatcacaatggtccaatccaacttagtcagtggaatctgacgatagtgagtgcggggtgcatcttcgataaagccatgggagcgcatggcctgggcaaggttctgcgaccaattgatagagaccaaaattgctttaaagtagagctgtggtgaccagaaggacaggacttgcccacgcatcagaccagcagcccgaatcacttgaacttcgtgctgaatccgaggtaccaagttatacgcggcgaggacgccatatgcaaatttggcgggtaaatgccagttctgctcaagcgagtcggttaattgtaagacgtcagtcgtgagcgtaaaagtagcgcccgtaaaaacaaacgcatagattcgtgtgaacaggacccaggccatcaaagtcttgtcaccgctaccgttaatgtactgggtactccaaagtccaattgctggtagcaacggaatgagtagtaaccaccctaatgttcgaagccgcgttcggtgaccgagcaggtaaatcagtgccagaataatcagtgccacgttcaaacttacaattgtcgtgaatgaaatttctagtgcaatgatgagtagtaataataatttcatgctaggattcatgattgcaccacccaatctaaatggtgattttcaaagtgtagctgatagtcaatcaatggcattaggccggttaactggtgactgataataatcagtgtctgcttagttgccgcttgggtggtctgtaataacgcgaccagggcattgatcgaatgcaaatccagcccttttaagggttcatccatgagtagcactggcgactgcatgattaacatgagcagaatttgtagtttctttttctgtccctcactcaaagtatagatgacttgttcatcacgaccggataagttgagttgcactaaggccgtttgaatacggtccgcggtaaagtagtcgccatacgcatagcgtttactttgagccagttcttcagcgaccgtgatgtttaaaaactgggtctcagcgtcctggaagagcaaggcgacatggcgagcatagcgtttgcgttttagcttatcgataggtgtgccttcgtaacgaatttcgccagtatagggatgcagacggacgagggcttcaaataacgtggatttaccgctaccgttaggacccgtgatcagcgtattgtgttgtgccaacaattgacgcgttgtcggtactaatagttgacgatcacctgcctgtaaagtgacgtgatcaagttgaaaacaagggtgttcaacgcgttgcggtgctgaccatgaccgttgtggctgctcagtaaaggctgaaaataactcagaccaggtggtgcggtcaatgagctgtaagtgctggtccttgatttggacgacttgatcgacgagccgttcgtaacctgttaggtcatgatccgccaagatgattgtcttcccatgttgattgcgtagttccacgagtcggtctaacaagacggctcgtgcggtcggatcgacactggcaaagggctcatctagtagaatgacatcgctatccatagcgacaatgattgcaagggccactttctgtttctcgccaccggataaatgatttaatagtcgtgactgtaaatttcggataccaacaaagtcaagcgcactaagtaagcgggccggtatttggtcacggggcacttgtaagttctcaagtgcgaaaattagttcattttcaacggtatccatggcaaactgctgattaggattctgaaacatcatggcaacgtgctgagcgcgctgattagcggtgctagcagttaatgactgaccatcaaaggtaatggtgccgtaatctggagtcaggggtagtaagcctgcaatcagctttaggagcgtcgacttacctgttcccgatggccctgtcaataggatgaagctttgccgtggtagtgttaggttaacgcgatccagaatgggtgtcgacgcctgtggataggtgtaagttaaattattcagcgcgatactagccattcgagaaagcctccattttataaagtgtattaatgcgttgattttaaaacatgactgcgatcaagtaggtccgtgatggttttagttaacagacccccgaaaacaaacatcgaaataaagcgaacgaccacgtataaaatcaagagccatagctgtaatttatagtaaccattacgggcaaggtcccagccaaaggtgaccacagtagttgttgcggccgcagccgttaagcctaaccagtcatagtgtttgtagccagtgacgatataacctagttcggccccaaatccttgcacgacaccagaaatcaatgtggtgattccccattgaccaccgaaaaacatttcgacggttgctgcgaggagctcacctagcgttgccgaaccctttagtcgaatgaggtagccagctaacatgccgggcatgcaccataagccaagtagtagttcattagccagaccgcttagaccaaatggtgtcagggccgcacttaaaatgttataaacaaaattagtccccataaagatggcaccaaagaaaataccaattagtgccagtaaaataatatcgttcaagtaccatgatttaacccatttcattgttaaatcctcccaaaagtagtttgtcattcacgcatccaagcgacaaaaaacgcctaccacgattatcggtggcaggcggctaagtctgaattgatggttccccaaataaaagcattgctccctgcgctggcattgtccagattcaggttcaatgggtattatctcagccgtgatggcaccccagttgctatgaatgatacgtttagtgtaacggataatgacattcagtgcaatcaattttccggaaactaaagcaaagtatgatgaaaagtcacaattttgtggtttactatggataaagcaatgtatttggttaatattcttaggagggatctcgatggcagaatcagtgtatgattttacagaaactgagatgagtggtgcgccacttgacttgtcacaatatcgcggtcaggtcttgctaatcgtgaatacggctagcaactgtggcctggcgccacagtttaaaggattagaagaactttatcagaagtatcagcaggagggcctagtggtcttgggattgccatccaatcaatttcatcaagaaaaggcggatgacgatgagatccatgactattgtcaacggcactacggggtaacgttccccatgaccaaacgggtgatggttaatggtgatgacgctgatccgttatttacttacctcaaacaggcggcgggacatggccgaatcaagtggaatttcacaaaattcctgattggtcgtgatggccgtgtgctcgaacgctatgccccaacgacacggccggcaacatttgaagcagcgattcgtgatgccttggctgatcgttcagaaaattaacgataaatttaacaatgatcgtttaatttaaaagaaagaagtggcttaagttggaaacttatacgttacgtgatggtttaacagtacctaaaattggctttggaacatataaactgaatggtgctcatggtgtgcaagtgatcgactcagcgattgatcgcggctaccgattattagatacggcctttaactatgaaaatgaaggtgctgttggtgaagcggttcggcgttcgtcagtaccgcgttcggaactcttgatttcatcaaaacttcctggtcgccaccacacctacacggaagctatcaatacgattcaagaatcattatatcgagctggcctggattattatgatttatatttgattcattggcctaatcctaaggaggatcattatgttgaagcttggcaggcactgattgatgcccagaagttaggcttgattcgttcgattggggtctcgaatttcttaccagaacatttagaacgattaaacaaagaaacgggtgttttacccgtcattaatcaggtcgaattacatccgtactttaaccaacaggcacaacgggattatgatcaagcacacggtattttgacgcaagattggagtccccttggccgggccagtgagatgcttcaaaatgagacgctcaaagagattgctgcgcactaccataaaaatgttggtcagttgattttacggtgggaactacagttagggaccttgccgattccaaagtcgtcaacgccgagccgtcaagcaggtaatatggacgtgtttgattttgaaatcagtgcagctgatatggcaacaattaatggtttgagccaagtggatggtcgcttgaataatcaagatccagcagtgtaccaggaattttaatttgaatgatataaaaagatagcgacgttgtgatgataactcgtcgctatctttttatgggcaactgcttgttgatgattggtttgtgatatcagcgtaatcgcaatacatggtgcagtagcgattggctgttttcatcttgaaaggtcgtggtagtatgacaaatacgtttcccacactaggaaaggttttcagccgtggtcactctacctgttcggtttgctttcttgcaaatcattttgagcatcgcactagcgatgtatcaggtatggaactccagaaacaaaaaatagccaccccaaaactttggccggtattgggtgactgttctttgattatctaaatttaaagccaactgctcttagagcgggccttgattcaagtcggtattaacgtatcggcttttttactgcctttatttaacacgtatgcgcttcagaaagtgtatttttgattcaaaaaaataaagataagcttccaatcgattggcataactattttattacgcgcgcttaaccgcgattaccttaacttgataagccccgttcggtgcgttcacagtgaccacatcgtcaacagtatgattagcgagcgcttgaccgatgggagatgtgaatgagattttttgttgttcgagattggcttcctgttttccaactaattgataggtgatttggtcatgatcatccagaaattcgatggtcacgaatttaccgatatcgagttgattgttgtcagctggttggacgatttgggcgtattgcaactgcttgttgagataacgcaggcggctttctaagcgacctaagtcccgtttggcactactatattcggcattctcagaacggtcacctagtgccgcagccgcagccagaattctgattcgctcgggccgttgttgctttaagtcttcaatttcctgttcgatggcatggtaaccagtcgaagtcattttgttaaaagttggttccatagcaaaaacctcgtgtccgttgaatttctgggaatagtttaccgcaaatgtgattagaatggtaccgtctaggtgatatctgatgttaatcacgatcgcgcaggtggttgctatacagcatgataccgctagtgacggtggtcagggcgataccagcgatcagactaatgaacggctgatttatcgcaatcaggaagtagaatagggcggtgaaaccgattagttcaatgagtgcccacaggccaaggtagcgccatgaccgtttgggtttgtcttctattggggtgctgacattaacagacaaaatgatcatggtaaaaacggcaatcatcaggacaatatacaacggattgtcgtacgtaaaggctttctgaagattgtttttttgccagccttgccaaaataaaatcagtaagatagcactattttcaattaacaacgtggtacggatgttcttgaaattttgtaaaattaaacgttcgtcacgaatctttttcatggcagggatctcctaactgggttcgacccaaaagacagtatcgagtgtttggttgagtgcgtgacagaggttgaggcagagtttcagtgatgggttataggtgcccttttcaatcaaactcagggtttgacgggtgatgccagtcttgctggcgagttctttttgtgagaatccggccattaaccggtattgcttgacatgattcgcggttaacatctccctttatgtaatatatatcttccatacaaagctaattttagcagttaccaattgcaatgtaaatgttggatagtttgattgaaatgtgaacaaataaatggttggcgtagaggtatgagcgcaaaaaaatagccaatgactttgcagccttggctagtcgtggaatttctcacgttccacggagttacgaacatgttaagtataggcaaaattatcgaaaaatacaattaatttattaaaggagtttggcttgacagtttaacaatgataacgattgcaaaaaataaaagtgaaatatttcagacaaacctcttgaattttagtctagaccaatatacaattggactataccaaacaaagagggagtcagttaattatgaaagttatcgtagtaaaggatcaagctgccggcggaaaagaaggtttcaaagtatttaagaatgctttagacaatggtgcgaaagtatttgggttggcaactggttcgacacccgttacaacttacaaagaaatcgttaatagtgacttagatttcagtgactgcacatccgttaacttggatgaatacgttgggattgcaccagacaacgaccaaagttataaatacttcatgcaaactcatttattcaatgacaagccatttaaggaatcattcttgccaaacggtttagcttcagatccagaagctgaagttaagcgttacgacaaagtgattgacgaacacccaattgacttacaaatcttagggattggccgtaatggtcacattggttttaacgaaccaggtactcctcgcgatattacgacgcacgtggttgatttaactgaatcaacgattgaagctaacgcgcggttcttcgccagcgaaaatgatgttcctaagcaagccttctcaatgggcttagcttccatcatgaagagcaagcacttattgctcgaagcattcggcgaaaacaaggctgatgcggtcaagggtatgattgaaggcccagatacccctgaattaccagcaagtatcttgcaaaaccatccagacgttaccgttatcattgacgaagcggctgctagcaagttaagcaagaagtattaattttaattaagctaaaaatgatttgaaagccgtgcttcataacgattgcgttgtgaagcacggctttttaactttgtcggtcaagtcggttattgtgccgccgttactaattttttctggaactgaaatcccatacatagtacacctaggatcagcgcaataacgccgctgactacgaagacgttaatacccataccagcaactaatttagtcaatggattaacgatgaaaggactgaccacacccccgattgagtaaatcgcgacgtacacacctagggccatcgaaacactgtttttgccaactgaaattgagatcaaatatggaaattgtcccatggcgatactcattgcggcacccacgatgaagctacctacaaaggctaaccatagcgaatgtccaagaccgattaacaggtaggacaggccgtataagataaacgagattgtgatggatgagtatttgaaccgcttgccgataacgccaacaatcaagccgcatagcatccccccaattaatgaaacggttgacgtcagagcggcttgtgaggttgcgccaagtttttcttcagcaacaaatagtgaaatgttgttgttcaaaacattatttaagagtaacgtgcagaatccccagaaggcacagaaaaagacgtatttgttgagcttaatttgttcaccggtatcctgatcgttggctgcattgactgctgccggatgcatcggcactaatgttaagatcacaatcaaaataagtgctgagaataagtaaatccaataattatttacccaaccgttcgttgcagctagctggccgccacccatgatgaagacaataccaccgagattggtgaaggtggttgttaaacccatagtggactggcgttcggtttctggtagcatttgagaaattaagacttgtgataaattggtgcaggcgccttgacctagaccgactaagcacgagcaaaataacaaaaacatgaagtttgtgtggaaggctaatggtagaaaaccaccgataattactaagattgccgcactaagggttaatgttttgagattgagcttggttgccgttagtttgccaataatcaaccctgctaacatcataaatagattaggcaatgatgttaacatctggacactcgtattactgagtgaaaaattggatgcgattgctgcataggatggggtaattgcgagtgccgccatgcccattgaactgactgcaagaaccccaatccgggtcttagaaacgtagcttttacctggtcccgatatcgattttgttgtttccatgctggacatccccctaaataaaagactcaatattggatttatgatttagttgacagtggcgaactttgctttgacgtaagccgcggcacttgttcctgcaattcggcccgacgtccaagtaaagccagaggcaaggccttcaaatgcaggatagctgtgtccctcatagtaaccaccagcattggcgccaccagtataaagaccgggaataggtttgaaatcgtcatctaaaacggcgagatttcgattgacccgaacaccaccgaccgtaccaagataggcggcttggcagatgaaggcgtagaagggaccatcactaattgaataatccaaggactgcaagcgcttactgaattcgctgtcgtttttggacgcgacagcttgattataagtagcgacggtctggctcaatgttgaaggatccataccagcattagtggctagctcagtgagtgagttccccttaaaagctgttttaccagtgacagcatcttcagctaatgcggtaaagtcaccactgccagtcgctgcgcccggtcctgcttgagacacttcttcgcgattgcggttggtggtgaatgtattgagcgtggcctgatccacgataaagagatattgaccaccctgagaccaagcagcgttcgcccattcaacggtatcgtagaccacatcttcgttggtgaatcgttgtccctgcatgttgacccatagttgaggggttaataataattgggttaatggattaccggaaaaaccagcaaggtgttgctgagaagtcttttgagtgacttgggatttagctagttgcgcagcatgaatgagcgcatggctgtcgatgtcagtaccgccagctttaaccatagcagccagaccttcaccgttatttggaacacctaaggttcttagatgcgtggtgtgcatggttcgagcaactttttcacgatcaccaccgtacccaccggttgccacaacgactgcgtgggcggtgattgttagctggtcacctgaagcggtcatggctgttgcgccagtgactgctccgttggtaattaccaggtcagtaaaggtcgtattaaagtgaaaattgacaccggcagtcgttaatgtttgttggatgcgctgatagctctcgtctttatgttggtacatatgataggaacccccacgataatcattattacgatgcgcaaactgagtcgtattggcagttgggttgagtttgatttccattcccattttttccaaccaggctaaggtatctgccgagcggttaacgatccgcgcaagtagggtaccattggacaaatagtgattgtagtcggctaattgtgtaatggcctcctgagttgttaggtgcataccggcttcccgttgttcacggctattaatggcgaaaaatccacttgagatttttgtgttaccgccaatttgtgattgcttttcaataacggtgactttaagtccatgggtcacggctgcgtatgcagcggctagtcctgtaccacctgtgcctgcaatgaggacatcagtatcaattgttcgattagtcataatagttgcactcccttattcgaatttacaaagttagtataaagctaaaatatgcacaagttgatagtgtataatatccttattaatatgtttatatatcttttaagggattgacaggtgatagtgatggcttctataaatacggtaaatagcaattatcaattgaaagaaagcgattttattggtctacgccgtaatgatctttcaagttcaccaaattgcagttcagagtttcacattcgctttatcgtgagccacgatttcgctgaattaacattagccggaaagtacgtggcactgtccccagatgatattgtaatggtttcatctgcgcagccaattaatattattaataggggggcaccagtaaagttaagtgttttttcggaacgtctgcatgcgcctacgccattaaacttggtggttgtcggagataacccaatggttcatgatttaatgaatgcgggtgagcggacattgcggtttattgtttatcgccaattgcgaaatcagataacccaacggtactttgatttgttgacggagttagaacggcaagatttgcaagatgtttttattgattatcaacgagaaatgacggtgggattgttaatgacggaactattgcggcatcatgaggaacgcatctcgattacggattcttattttcctggtaaaaatattcgacatgttaatgctgatacgcaatcagggatgatttttacgtatttagtcgcacataacgcagatgcgacgttaaaagaaacggcatgttactttggatatgataaaaattatttttcaaggctgtgtcgacgactgttcaacaagagcttttcggaacaattaacatttattcgtattgaactggccaaacgaatgctggcattttctaataagcgaattgaacaaattgcagctgaattaggctataaaaataatagtagtttctttactgcgttcaaacgcgaagtggcgataactcccaatgattatcgtgagcagcatgggtatcggttagcacatcagcatatcaatgataattaaaaacacaaaacgacgtgctactgaaatgttccagtagcacgtcgttgatgatttttttatagattttgtcctttttcccaagtcgttttcgataacaacagcccttgcttaaccaaagtatcaaacaacgcatgggtccggttggaaatttcggcggcggtttcgctattggctttggtcaagaaatcggtcggattgccggtaatggctgcgtcggttgcggcaacccggccacgggcatatgattggcacccgtcgcgataggcattgaccgtttcagaaaattcatgccagtgtggttcaatcaagacggagagcgtttttgataaccagtagacgttatcaacgctgaccgtgctagttgtattgcgataatcaatcggcgtgtcattgatgttggtaaagaagggcacgtatggggcgtaagcgaagaaacctagtgcgatccattgaatggcggcttgcttagcaggcacgtcattccggatttgcagaatagatgagcactgattgcgatccatcgcgatagaccggtaacgtgtttgttcacgggcgttaccggaagcgaaagtgccaaatggatcgtaaggcgtcccgttatagtgtgaagataagaagaactggacgtcttcaatagccaattttttgcttggttgtcggaatagcggcatgttttgatcagtgggattctgttcgatttcgggattaaatagtttttgaccataccatgttcgcggagtgttgtaataagcatccgcctcactttgggtaccaaagatttcacggaaattaaagtgaccgggtgttgggttgaggtgatacttttcaacgaagtccactaaatcactggcacctaggaaattgtcggtatcgttgagatccatctcttgcaccacggtttggttgggaacaattgcgtaggtgtcttcgggcatccgaactgccccccaatggtgaccaccagcggtttcgaacaaccagatatcgtcgtgatcgttaaaggcgatactgttgctttcaccagttccgtatttttcaattagggcacctaagcgttggacaccttccttagcacttttaatgtagggtaaaacgagggtgaccatggcttcttcatctacgccatcatggacgagcggatcataaccgagtacgcgggcattggtggcagtggtttcagttgcgctcatcccgacatttaattcgttgatcccagcttcctcgtactgcccatcgctttgatcggcttggggggttgcggtgtagcggtaggcatggtcaggcagcggaacggtgacgccggtagttacggaagtgtagctggcgttagtttggtcgtgggcttcgtgcacaataaacttaatcggattaattgggccgtagccatcttcgttgcgggcaacgatggtcgaaccatccatgctagcagctttcccaaccaatatttcggtacaatcagtgtcttttttcattacataggtcactccttagttaattataagtataggagcttgcggggggatttcaacgttaaatcgtattcgtaatcatttaaataataaaatgatgagagaattgccaggtgttttctgcataaaatgttgaatttgattgtgaaaattaaatcatagctgacgaaaaaagtttaattagtctgctggtattgccgatataaaagtttttatcgatactgtgccaaattttaactttgtgaattagtgagtttaattgtggcacagtttcctgtgccacgggtctaactagaagttcttgaaaccgcttaccccgatggatatgattaagttgttaagaaaaaggaaggagctttacctaatgagtgaaaatgtaaatacgaatgcaacccaaagcgctcctgttgcgaaaaagaaactgggcgttaaggcacgcgttcaaaaatttgggagtgcactaagtaatatggttatgccgaacatcggcgccttcattgcttggggcttaattaccgccatctttatggctggtggttggtggcctaatgctggattagctaagatgattcaaccaatggtccattatttattgccattattgatagcgtttactggtgggactttgtttgccggtcatcgtggtggggtcgttggtgcgattgccactatgggggtcatcgttggttcttcaatcccaatgtttatcggtgccatgattatggggcctttaggcggttggtgcattaagaagtgggatgacgccatttccgataagattaagagcgggtttgaaatgttggttaacaacttctccgctgggattatcgggatgttactagcaatcctgggttactttgcaatcggcccattggttgctggtgcaagtgctgctatggctgccggtgttgactggatcattaagatgaagctattgccattagccaacgtcttcattgaaccagccaagattttattcttaaacaatgcgattaaccaaggtatcttaacaccgcttgggattcaggctgcatctagtgcgggtaagtcaattctgttcttgctcgaaccagatccaggtccaggtcttggggtcttattagcctttgccttgtttggtaaagggactgctaaggcttctgcacccagtgcgattattattcattttcttggtgggattcatgaaatttatttcccatacgtattaatgaagccagcattgttcctagctgttatcgctggtggggttactgggacagccacattcagtttactaaacgttggtttacgttcaacaccttcacctggttccattatttcattactattaatgtcaccaaagagtgtttctaactacattggtttaattatcggggtaacgttagcaaccttagcatcatttatcgttgccgcaattgtcttgaaacgtgacaagtcgaccagtgatgatgacttagccgctgctcaaggtaaaatgagcgatatgaagagtggcaatgctgaagctgctagtgcgactgacgctgaaccagctgatgtgattgcttcatacaaagatgttgaccatattatttttgcctgtgatgccggaatgggatcatccgcaatgggggcttccttattacgggataaagtcaagaaggctggcattagcatgtccgtcaccaacacggcgattagcaatttgaaagacgaacctggtttattagtgattacgcaaaacgaattagctgatcgggcggctcaaaaggcaccacacgccttacggttagccgttgacaacttcttgagtagtccaaagtatgaccaagttgtggttaacttaaaggctcgtgatcaagttagcgatgctgcacctgcatccgcggcaccacaagcaacgacgactgcacccgacgacctaccagctaacttagatttgagtgttgttgatgaaattgtctttgttcaccacgatggtcatttaggaacagccacaatggcaacgtccttgatgaaggatcgggtcaagaaagccaacaagcatgtgagtgttaagaacttaggaattgacgaattggctgataataacagtttattagttgtttcaagtgcagaagcagctaaaaacttaaagacccgttacacgcaggtccaagtattaattactgacgatctattgagttcacctaaatatgataagatggtatcagaattgaaataaaatgatattattaccattatcgtatgaggtggcatcatggttaagtttacacaacgtcaagatgagttgctacagctgctactagcgaatcccgccggcctttcaatgagtcagattgaaaccggtctcaatagtagtcgccgaacaatttatcgcgagttcagtaatttggaattggtattagccaatgctgatttgaaaattgttaatgagaagcatcactttcaactaagtggatcgcagacggccctggccaagtttcaaagccaattgacagcagagcggaagattgcaccggcgtttgactcacaaacgcggcaaaacgccctagcttgtcggttactgatgacgggccattccgtaaaattaaaagaacttgcgcttgactttgatgtgagcgttgcaacgatttcaaacgatttaacggcattagcaacgccattcgccgactacgacttatcaattgaacggttgaagtcccgggggattcaggtggcggggactgagggtagtattcgcaatctgtttgccaccattttgaataatgaaatcaacgactacgagttttttaaaacaatcgggaagttgaaccaaggcttagcaatatcagcaagtgatgagcaatcgtattttttgaacttactggacgcccaaacgttgattatctgttatcaagcagtgcgaagtttgaagaaaaagtacttttcttcggtgccggatggtcagctacaacagttgatcatcacgttgacgacgggagtaatgcggttacagcatgaacgtcgggtcacgtatttgcgcgggatcaatcgggatgatttcttgaaatatcaacggattgctctggcaattatgacccaactacccgctgagattaagacggtggtgacgggagctgaaattgattttctcgcccagcaaattaagggcttgacgtttcgaatcgatcaagacgcgtcgctatcgaattatgatttgcaactaacgtatcgggtcaaaaagtttattgacgcggttgcgactaactttaactggtcgtttgggacggatgaccgcttgttgaataacttgacggcacatatgcaaattgccctacaacgtaacggtgttaatggtcccgtgccgccaaccactgagttacaagaggtccgtgaacagtatcctaagctgtattcggcggtggtgcgcggcttcgcaacgatttttaaagaccaggattttacaactgatgagttgacgtacttgttgattcactttgctagtacgtatgagcaacagttgagtcaccaagcactcaaggttttggtcctgtgcccgaatgggatgacgacggcgcgaattttgaaaacgcgactgatgcggttagtacctgaaatcacggctatcgaggttgcgcggattggtaatttaggccaagttaatttacaagactttgacatgattttatccacgacaacgttaccgggatttaagttgaattaccgcgttgtcagcccactgttactagaaaacgaagtcactgccttacgggaatatattcatcagtattttccaagcaccaaagtgatcgattcaccggttgatgagccgacgaaaatcaacttggattttgacaccgtttaccaacagatgacgattgctaaacagatcttagaccgtttcactatcacgccgattcgcaacgatgatgagacggtggccgagatgctagttaagatcacgcggcatattgattcgaacttgattcatgatccgctagaagttgcgggccggttgttacaccgcttaggactggcgccggtcggtattcccaatacgaacttggcgttggtgcatacgttaagtcaggaagtcaccgcaccatattgtgcgattttcgaacttgaccagccattaccatttaagagtatggacaaccaatcgattcggttgcagcgaatcgtcctaatgctcgggcccgccaatatcagcgattttgaaaatcggttgatgggtaagttaagcgcactagtcattgaaagtcaggccaatacgcagacgtttatgactggcgatcgccagcaactttatcaattaattagtaaagcatttttgaacgaactaacgaaatagcgtaggtgaaaacaatggaagctttagataggaaaatgattgcgttgaaccagcaagtggctacgcaagaagaaggcatccgcttagccggtcaactattggtcgatggcggttgtgtcgaaccagaatacattgatgcaatgcaggctcgtaatcaggatgtctccgtatatatgggtaatttcattgccatcccccatggtactgaagatggcatgaagtatattaaaaagaccgggatttccgtggtccaagtaccaatgggtgtgagctggggtaatccagatgataacgatgatgataagactgtaacggttatcttcgggatcgctgggttgaacggtgaacacttgaacctcttgtctcagattgccatatactgcagcgacgttgccaacgttgctaagttagcggacgctcaatctgaagatgaaatcataaatctattaaaggaagttgattagcatgttagacgtacattttggcgcagggaatattggtcggggcttcattggcgaaaccttggctgacaacgggtttaagattactttcgttgatgttaatgatactttgattgacgaattaaacaaacggaatggttataccattgaattggctgcagaaggtcaaaaacatattgaagttcacgatgttaagggtattaacaacggtaaggatcctaaggcggttgctgaagaaattgcccaagccgatatggttacgactgcgattggacctaagatcttgaagttcatcgcgccattaattgctgacgggttaaagttacggcaagctaacaacaatacgacaccaattgatatcattgcttgtgaaaacatgattggcgggagtcagtcattaaagaaatccgtttatgaatcattaaatgaagacgaacaagcttgggctgaccaaaatgcaggcttccccaatgccgctgttgaccggatcgtaccgcttcaaaagcatgatgatccattgttcgtttcagttgaaccattcaaggaatgggttatcgacaagtcccagatgaaaaaccctaagattcaattaaagggtgttgattatgctgacgacttggaaccatacattgaacggaaactcttctccgttaatactggtcatgccaccgtagcctatactggtaacatgaagggctacaagacgattggcgaagcggtcaaggatgacagtgttgttgaccaagctaagcacgttttaggtgaaaccggcgacttgttgattcaaaagtggggctttgatcctgaagtacaccatgcttatcaaaagaagattttgagtcggtttgaaaacccatatatctctgatgatattgaacgggtcggccggacaccaattcggaaattgggtttcaacgaacgtttcattcgcccaattcgggaattgaaggaacgtggtcgcgattacagcgccttagttgatacagttggtgaaatgtttttcttcaactatcctaatgatagtgaaagtgttaagttacaacaattattgaaggatgaaccaatcgaacaagtcattcgcgaaacaactgacttgaaagatgaagatttagttaatgaaatcaaagctgcgtacgaaaagcacttagctgcaacaaagtagttcgataaaaaaactaattactaaccgccatggtaattagctgcaaaaggcgcccagaaatttaattctgggcgccttttgcgtcttgcctgacaaagaagcacttgatagcagccatcgctgggcgagttaactggaacgatgaacgtgtaggtagcttatttttaagactggcagcacacgttaatttggatggtaggtaattctaactgttgccctaccgaagtaagtctaatgagcaagtatgttgaccagcatacggctacttttcccagaaatgccaccaaggtttggccgcttgactggcttgttgatcaagttggtcaaggacttggtttaagcggtcactgagtgaatctaagcgccggatgatcatttcttgctgcttatagagctcagcattagtcgggccatctggcttggccgctggtgccattttgctgggatcgacggtggttgtcgtgatgaggggcgacttggtggtagttgcaggcgctgatttctcagactgagtcgtcgttgccgccggttgtttggatgtcgggaccttagcaccaaacgcccgtcctagcgcagtggctaacgttgtgccctgttcagcgagttcgatggccgcctgaaaagtttttaaatcagcggctgtatataagcgatgactgttatcggccgggcggaagcgattttcatcgttaagctgtttttcaaccatggtgctatatttgcgcaacgtcacggctttaataccgagttgttcagcggcgacggaagcgactaattcggagtcctgttcgggactgattgtttgtgtggacacaaaaattcctcctttaggttatatcgtttctataacgctattatatcgaatttttgattggtagaacaccgatataccaagattttgtgacctatgtacgtgattcagacccggaagtcataattttgtgggaaaacatgctatgatagaacgaaaattaattggaaatgaggattagatatgatcgaaccagtcgataagacgacttttgcgacggtggctgatggtaccgcgttaactgtggttgatttttgggcggattggtgtggcccttgcaagatgcaggaaccagtgcttgaagcgttagatgaactgtacgatgggcaagtgaaatttgcttcgctcgacgttgatcaacatcaggaaattgcgcaacaatttgagattatgagtattccggcgttagtgatattcaagaatggccagcccgctgaaaaggtggttggttttcatccccaagcagcattgaagaaatatctggatcaaaaactagccgaagtgaagcctgcctaacgagcgttatttaacggtagctgttgaagcaatcaataagtccccccagaaacggttaccgcatctgggggacttatttttcttggtgagtaatttacgcgttatgacgtaattgataagctgcccatgtgctgaaaatggcaatgccaagaattgcgaggttaatgagaatcgtttctgtcagtggctgggttgatggggagaaataccattgttctagtaaagaagtgtacaaaaacacgggtgcgtagaagaagcggagccatcgttgctggcggtgtaaccacaccagcgtaattcccgacaaccatatcagtactgatataacaaccgttgtcagtggactaactagcatcgtcagtgtggcgattatggctagcagatagggtgttgtcataagtgggttcttgaatgagttcatcagtagtgcctccttattgaaaaagctaatgctcgtctaagtatatcgcgataatcaaaatgtttgtattgccatcataaaataaaatatttaaatagtgattttgacaataaatcagtttagctgtcaagttagaaatcgttaatagtttaaggggaagcgcaactagaaatggcgagttggtgcgactgccctattaataattaaattattaccggctttgccaatataattagctaagaccatgttaaattaagtagcgtaattatggtaaagtggggggctaatcattgaaaaaattgatttgggcattacgggtcggtatcgtcctctttggtgcttgtttggtgtgggaacaagtgcagcttgaacggcatacaagccagcgccggacctatcatcaacgtcggctgcagcgtagtaccgcagcaacgtttaaggcaatccgtcagccacaacttagtgattttccggcagctaaggtggaagccgcacaagtttggctacacctgaaggggactcgggtcatcaacgaggcaaccccgttacatatccgcaaaattgcggccggacagcgaattcagccagacgatccgcacagcgcggtctatcatcaccaaatgacccagatttatagtgatgatttacaagatgctactaatagtgtgatatacgcgcggaatgcggataatactgtattggttgcgcatagtcgttcggggcaacgctcgcaagtgggtccggttgcccaaaatgttcacacagcaatgccagccgttcaaaagatgaagattccggctaaaccatccgcgacactgcttaaagtcgttcaactgatcatttaatatggggcaatttaaaaggctaacccacacggtgggttagcctttggtgcgtgatgctggccagctaatagtggtcatagagttgctcaattaagtcatcactattggtaatgagctggcgatttagtgaaatcagatagtctggttgtgctgggtgaacggcgttgtagagcgtgtcttcaatgagacagccagtcagcgtgaacgaccgctgccgaccttgaacaatgatggtgaaggaacgtccacgactagttacgatgacattcaatcccattaagtgggttaggttcaaacctaacgttgcagttgaatcaattaatcctggtgtgccagtacgtttaatcaagactaggcattcatcaatccgtcgtagcgaattaaacatcgaaaatttactggtgttgcgcgggtccgatttgacagcccgcggccgccgtacatatggtccaacgactatgttcataatgattcccccaaaccatttagttgattggtttaatcataactagtgcgaacgattagtgcgaaaatttcggcgcgtgttggcagttagttggggcagtttacgggttatctttggaagctttactaacgttgtgacggaaaacatccagtgtatacaaattcgcaattactggacgcaatggcgttcagaccattgatcagtaattgcgaattgcgtaatcgtgatgttaaaaatgaagctaggcttttactttgttgtctgcttttcgtgctttaacggctaattcgggaaaccaaattgcaatttcgtgatgcgcattttcacggctatctgaggtatggataatatttcgtaaaataccgtctggatattcatgagagaaatccccccgaattgtgccaggttgtgcttcggcaggccgggtgctaccagctaaacgatgcaccgctttgacgacgccagtaccacttacgataatggcgacgagtggaccttccatcatgtaggtctcgatttccttaaagtaaggcttaccaaccttctcactgtaatgttgttgaagttgctccgcggttgctttaataacctttaaggcggcaatttgataacccttgcgttctaaccgggtgataacctcaccaatgtgtccttcactgacaccatcgggtttaactaggaccaatgttttttcagaatttgccataatacgtgacctcctcgctttttgaaagcggtatcatttataacttaaattgtaggtgactttgaggggtacgtcaactagaatcgccgttttatcatgaaaattgcttgtaaattggcgtcagctggtcaataattgggacgcgagaagcgggctcaactagctgaattattttctatcgttggaagatatcgctataataaaattagtaaatcataaaaggatttgatactcatgccaccacttgatttaactcatattcgacaacatcatacggttgctgaattaattgcgctaggaaaggcgcggcgccaagtcaccccatttgaaaaattagggacatttacaccggtgaaacgaaacgccagtgattatctgaaacatgtgcgggagatgctggtaccagaactattgccattgcggcgtgaacgaatgtctgcttcggcttttgcattcttccggggatcagttgagttaatggattacgatttggattaccagtcgtccactgaaattcccgccgtagtttgtggcgatgctcatattggtaactttggattctatgcgtcaccagaacggcgactggtatttgacctaaatgactttgacgaagctggcgtccatccgtgggaatgggatttacgtcggttattagttagtgtgttgctagctgctcgtgattctaactttaaaccaaaaaaggtcgaaaaattgatacaggcggcgagtgcgagttatcgggaagcactcaaacggatgtttgatcagacgacgttagaccgtttttatcgcgataacgaagttcaggctgtcttgaacttcggtggtgctcccgaagatacggccgatttaattgcatccttggttaaaaaggctcaaaaacgtaattcagaacaagttgtgcgtaagtttacggtcactaatagtcgcggtgaacggcaatttaaggagaacgcgccccgttctgtccatattgatcggcaaacttatcaagggctaaaggccggaattagcgagtatttattgaacgtacggaccgatgtcgctttgctgttgtcgcaatatgaagttactgatattattcggcatagtgtgggcgtcgggagttttgggtcactatgttacttggttcttctgacgagtacggatggtagccatatggtgttacaaatcaaggaagctttaccaacgcggaaagtcgggagccagtcgcggccagcgttaacggccgccatggaattgacggaagggcaacggatcgtcagttcgcaacgcattttacaagcaacctcggatgcgttcctaggctatttccaaatggaaaataagagtttttatgttcgtcaatttcgggatatgaaggaatccatcgatattccaaccctagactggggtcaattccaagcctatgcaaatacgtgcgcaatgattttggcaaaggctcatgcgcaaagtccaacggcggccatgattcggggatacgttggtaattcggcgaagtttgatgaagccatggctaaatgggccacggcgtatgttgaacaagttgataatgattatcaagatttcttagatgtttgatggtttaaacgaagagttgatcaaatatcgcactgaaacgcgtgacgattagacgtgtattgaaaataaagaaagggtcatcggaatcattgatactccgatgaccttttctgtcggtaattagacatagactaaaatatttttctggagcgtaagtcttgatttaacaacgttttttggcgattgaacaagtgattttgaaaattgataggctaaaatggttgcactttttcaacaacttgatatacttactattagtaagtgaaacgaagaaattagttttgaaaggattgtttgatatgacaaaatatggtgtaattgtaggttctattcgtaaaaattcttattctaaaggggtcgctgaagccatcgttgctgggttaccagacgacgctgaagtaacgtacttaaatatcgctaagttgccactatataaccaagactacgatgcggattcacccgtagaatatacagaatttcgtcaggccgttgcggctcaagatgcgttcatctttgtcacacctgaacataaccgtagtatcccagcagccttgaagaatgctttggacgttgcttcacgtccatggggtcaaagtgtttggggcggcaagcctgctttggttgcttcccaatcgatctctggtatctctggcgtcttagcacaccatgttttacgtcaatccttggtcttcttagacatgccaacgatgcaacaaccagaattgtacatcggtaatactgataagttggctgatgaaaatggtcatatcacaaatgaaggcacccaatcattcttagctggtgctggtaagcaattcagcgaatttgcagcgaagtttgtcaaataattgtggataataaataaattttcaaagtaacgtaaaaacgtacttataaaatcaattttgattttataagtacgttttattgtcgacacaataactgatacgagcaaacggttattctaagccgcagttttgataagaatcaagcttgattgctggttgtttcatgataagcatgcaattgagtggcaactagatgggccgggttaccgaccgcagtaacgtgggcgggaacgttgtctaaaacaatcgcaccagcaccaattttactgttggcgccaatcttaatagggcccaagagttgggcgtgggcaccaatgaaagcaccgcgacaaacatagggatgccggcgcccagcttgttcggttttacgtgcgcctaaagtgacgccgtgtaaaattgtaacgtcgtcttcaatgaccgccgttgcaccaatgacagtaccaataccatggtcaaagaagacccggtgaccaatttgcgcggccgggtgaatcagaatcccggtacgccgggccgcatgttggctcagcaaggcggccaataatggtaaacggtgtgtttcaaaataatgggcaacccggtaccaggcgagcgcgtgaataccaggataggtcaacataactgtccgcaaattgatcgcggcggggtcacgattgagaatggcacgagccgtctgaaacaccagcttaatctgcctgaatgctagcgaacccgcgctcaaggtctgctaacaaatcgtcactggcttcaacaccgactgataagcgaatcagctcgtctttgatgccattctgtagccgaattgtgcgtgggatggcaccgtgagtcattaaggctggaatttcaattaaactttccaatgctccgagactttcggcgagcgtgatgacttgtaaatgttcaacgaaggtctgggggttcattcctggttgtaattcaaacgagatcattgcgccgaagccattcatctgttgcttggcaatcgaaaaatcgggattatcaggatcgcctggatagtaaatcttagcaactgctgggtgagactttaagtaagtaaagattttagcggcattattcaggtgggcttgcatgcgcaatgccagagtcttcataccacgttgtaatagccagctttcttgcggggccaaaatactaccgatggcattttgcaagtagccgattttttcgccaagtgctggcgtcttggtgacaaccaagccaccgataacatcactgtgaccaccgagatacttggaagcactgtgtaaaacaatgtcaacgcctaaatccaggggcttctggacgtatggggaggcgaaggtgttgtcgatgatactcagtaaatcgtgtgcttgcgcgagcttcgcaatggcagcaatatccgtaatgtgtaataacgggttcgtcggtgtttccaaataaatcgccttagttgtgggggtaattgcggcttcaacggcggccaagtcacgcgtatctacggctgtaaaagtcatgccaaagtgtttcaaaacggcgtcgatcaagcggaaggtgccaccgtagacatcatttcccacaataatgtgatcaccagccgagaatagtgagaagacggtattaatggcagcggagccagaagcaaatgcgaagccagcgctgccatgttcgagggtggcaattaatgcttcgacggcggcccgggttggatttcccgtccgtgaatattcgtattgattttgaccgatttttgtttggcggaaggtcgaggccatgtagatgggtaccgaagtcgcgccagtagtggcgtcctcactgataccaccgtgaattaattgggtttcaaatttcattgttaaagtcctcatttcgtatagattttttggctcagataacgctcactactgtctggaaagatggtcacgatatgactattggcaggcaggttggtggcaagttgtaaactagcggctagcgcagcgccgctagaactgccaatcagtaaaccgtggtcacgggctaggtgtcgaacttgggcaaaggcatcattgtccgcgatggtcagtgtctggtcgatgcgaacctgatcgaaaaatggtgggatgaattcgacgccgattccctcggtacgatgtgcgtgagctggtccaccatttaaaatggaaccttctggctcaacgactacggctttggttgctgaatcttgggcttgaagataagccgctactccggcaaatgtcccaccgctaccggctccagcgacgaaggcggttataggtgcaggcatgtccgccagaatttctggtgccagtgtgtggtaataagccgcgggattagccggattcttgaattgcatggggacgtaactgttggaaatcgttgcggctagtgcctcagctttgcgaatggcacctttgattccttcctcgctaggtgtatgaacaatttcagcacccaatgcttgcattaaaacttgtttttccatactgaacttttctgggacgactaagatggtacgtaggtggtgcgcttgagttgctaaggctaaaccaattccggtgttaccagcagttggttcaataatcgttgtcttggcgttaacccggccccgttgcaagccgtcttcaatcagataggctcccagccggtccttaatactgccgccggggttgaacatttcaagcttggcatagatgtgactgtgatttggaacctcgatgggtaacgccatcaggggggtgtggccgataagttcttgaacgtgctgaatgagcatataaattcctccaatcgctgcggtggggtgccaaaagcgacaaaaaaggcgcgagaattcgaatgaattcctcgcgcccagtacaatatccagccatgctggacattgatttttaggatgacactcctcaaaaagtcaatgcttaacaggccgaacatcgcgataagcgcgcagttcggcaacaacagttattcaaagcactacttgttaattgagtcatgtctgatcctcctctggattgattgggactaactatacaagatgattttgagcgcgtcaagtggtgaatgacgatttgcaataagcggtaagagatgaagattggctgagaacgttattgaatcagcgttagttttgccaaacggttgtcattaaaataaatatattaggtggttgaatcagttgattgtgaccgaggataaagatgttaaaatttatccaatatcagtttttcatgtcttataatcaagacgttttccaagacacatataactagttttattctgacaatagctagtgaatgtgctgttgataataactaaaacaatcccaccctgattagcaagtgactaaactagggtgggattgttcgtgattataatttaaatgatattacttattccataagtatttagcatcaaaatcattatcgaatgatgataaaatcttaggaccgtcatcggtaacgacaagggtgtgctcgtattggcagctaagactgccatctaaagtgcgaacagtccaaccgtcatcggcagtttcgccagaacgccagtcaccaatattgaccattggttcgatagtaatggtcataccagcttttagacgggtgccgtgaccagcttcgccataatgtggaacatcaggcttttcgtgcatcgtcggtccaataccatgaccaatgtattcgcgtacaacgccgtaacccatttcgttttcagcgtaattctgaatagcccagccgatatcaccaattcggttgccaacaacggcttggtcaataccgaggtatagcgctttatgggtcacttccatgagttttttaacttcgggtgatggtgtaccagcaacaaaggcgtggcaagagtcactaaggtagccatggtagttaataacggtatcaacttttaataagtctccatctttgaccaagatatctttactaggacagccgtgacaaatcatgtcattgacgctgacacaagttgagtacttataaccttcaaagttgagttcgccaggagtagcgtcgtgtgcaacgatgtattcgtaggcaaagtggtcaacatcccaagtcgtaattccaggcttgatgtagtcttcaagggcgtgaaacaggccaaccatgatgtcaccggcagcttgcatccctttgatttcgcgatctgatttaagcgtaatcatgaggttcctccaaaaaaaattaattatattgtgatgctaaaagtttgttcctctccagtatactgcaagcattgtattgcgacaaaacgcattgttttgacctgatattgataacgctatcagtaggccgaaatcaaaaaaatataaaaaaatcagcacgccaaaaataccaaattgccggggcgcagttggattaattgtaaacaattcaatataaatttggaattttacccttttcatcggccaagataatgatacaatatattgtgttgttttaaacggaaacactacatgtagtagtgtgacgtgactggttggccaactagacacctacaaccgcatatgaaaacggaaagaggagcatgattttgagtaattattttaaattcttatcacaccaactaaaaggttggccacaacagaactactatctattctattttagcctaggatgtcaagtaatgacgttagtaagtgcgccaattacagcattgtctattttaacatttattgggaccactttgggtgttctttgtgtgttagccattaatgcggctaagtcagtcaatggattattaggcgtcatctccgccgcttgcttcatcgtagttggtttttcagctaagaactatttaagcattggggaacaattagcctacgtcgtaacgcttgatattccagtactattaagtgctaattggaacgtcaacatggtttcaaagattcggaagtttacgggtaagacgtggatcgtcgcaattgtcgcaactttagttgtttatgccatctccggctatcttattggtgccttaactgatgatccccggccatgggtcgatgccattagttttgcgatttgtttaacggccggcgttatttgcttcctccgttacaacaaccagtatttctggtggattgcctctggtttagcacaaatggtcctctggttcatctcgttccgtcaaggttcggcgacactagcaatgttcattaatagttccgtttatctgatgaacgatgtcttggctttcactgtttcaccttggtataacaaacatgaacgcgctcggttgatggccgaagaacaagcagctagtgatgcagctagcgcggatgctagtgataatcaggcatttggattgaatcactaaaggtcagctaataaatttactgagactagtagcgttaatattctaaataaggcgagtactgtaattcttttggattagagtactcgtctttatttgaatagctccggattgtatcagttatcaaatatatgcttttttattgacattataataaacaatgttaaagtttaataaacaatattaaaaaagagggatgctatggactggtttgtgaatttagaacgtgaggatcaggaatttgttaaacaattggttattgcctcaggttctctaaaacaactcgctaagatttatcaagtgagttatccaaccgtgcgaatgcggttaaacacgattattcaaaaaattaactttattgaggacaacggtgcaaatacgtttgaaacgaaggttatgaaattggtaatcgatgagaaattatcgttagaggtagcaaaacagattattactgactttagggaggaacaacatgagtgattttaaaggaattctgattggtatgttggtcgttgcagtgctctatatgttagatcgatacttaccaaggtggtttggggcaattccgggagctggctttttaggctttattatttacattgtttttacaaaagaggtctctttattatcaatagtaaccgtattgttagttggcgaagccgtgctgaatggtatctggatagatgcactcgtgaaccgaaagagaaaaatgaaaaaagaagtagcaacaatgaaagcgaaagatttattgcgaaaatagtaatattaatgaaatcatcagatatagaatcgacattggttggagattgctgttagcgctctgcgaatgtcgattttttattgtggtgcggactatcctgctagttcaaccaatactgtataggtgttggcacttattatgaagcagttattgaatactgaaatataagctcgaattttgtgaactctagacatgtctagacttgatctgtctggtataatctacaaatttaattgggttattacttaaatattgacaacttgtctaaacaagtctatattcataaatgaaaacgataacaaaggggtggttgccgtgaataaagcggccttagtttatcaagatttgctccagaaaattgatgcggaggtttacccgatcgggagttatttgccgagtgaacatcaactttgtgagctatatgggatttcacgtgagactgggcgcaaagcattagcgacattggctgaggatggctatattcaaaaaattcgtggtaaagggtccattgtgattgagcatcgacagtatgaatttccagtttctggcattgtgagttataaagagttagccgaaaagttacacattaagacgcaaaatattgtttatgactatcaaccggatgcaacgttaccggttgctgactttacgtcacttggtaccgaattgacggaagcgccagtgacggccatcaaacgagtccgagtgatcgatggcgaaccagctattattgataaggattatattttgaaatcgatcgttccgaaagttcccaagcaagcggcggaagactcactgtacgcgtattttgaaaatcagcttgggttgacgatcggttacgcgacgaaggaaattacgatggcgccggcaactgatgaggaccgcgaacacctcgctattagtaagggcgcctatgtggcagttgttcgaagcgtgacgagcctcacggatgcgcgagcgttccagtatacggaatcacgacaccgggcggaccgctttagtttccgcgattttgctcggcgaactaagaaataagatgtggcatgagagggatagcgcatgaaattatcagaacaagtgatttatcagatttatccgaagtcgttttacgacagcaatggcgatggcgtcggtgatttacgaggtgttattgaaaagatcgactacctcaaaaagttgaatattgacatgatttggtttaatccgttttttgtctcaccacaaaatgataacggttacgatattgcagattactaccatattgaccccatgtttggcacgatggctgattttgaagaactcgttgcaaagctgaaggcaaatggtatcggggtcatgttggatatggttcttaatcatacttcaactgaacacgagtggtttcaaaaggctttggcgggtgatgagaagtatcagaagttttactatctccgtcctcccaaggctgatggtagtctaccgaccaattgggaatctaaatttggtggtccggcctgggcgccgtttggtgatactggtttgtactatttacatttatatgatccgactcaggccgatttggattggcataatccggccgtacgacaagcgtgtgccgccgttgtcaatttctggcggcaaaagggcgtgcagggttttcgtttcgatgtcatcaacgttaccggtaaagctgagaagttggtggacgcacctaagggggtccctagcaagacgttgtatactgacacccccgttgttcatgattatttaaaggaattgaacgcggcaagcttcggccaggatgtagatagcgtcacagtgggggagatgtcttcaacaaccgttgcgaacagtgttggttatactaatccggctaatcacgaactctcaatggtctttaatttccatcatttgaagacggattatgttgatggacggaagtggtcccgaatggccttcgacttcccacgattgaagcaattattagatagttgggccggtggaatggcagctggtggtggctggcaggctttgttttggaataatcatgatcagccacgagcgctgaatcgctttggtgacgccggtcgttatcgtgtcaagtccgctgaaatgctggcgacggtcattcacctcttgcgtgggacaccatttatctatatgggtgaggaactcggcatgactgatccggactatgacaatatggctgattacgtggacattgaggcattaaatgcttatcgggctttaattcgtagtgggtacagtcatcacgatgcgtttacgatcgttaagaccaaggcgcgcgataactcgcggacgccgatgcaatgggatgatagtgccaaggctggtttcactactggtaaaccgtggttgacaccgactaatcaggcgacgattaacgtggcccatgaattggctagtggcgagatttttgactattatcaacggctcattaagctaagaaaaacgatgccgatcgtcgcggatggtggttatcaatcgtggcgcttagatgatccgcaagtcttcggctattggcggacatatcaccaacaaaagttattagtgcttaataatttttatggtcagtcaacaatggtgacacttccggaagaaatggtcggtgcacaggtgttactttccaattatcaagatgttaatgtcacagcacaattgacgatgcaaccctatcaagcggttgcgctgttgttaggttaagaatggaggaatgggtatggcaaaggcacaaacagtaacaattttgtcgccggtcaatggggacgttattgcgttaaataaggttaaagacccggtcttttcagccggtatgatgggactgggctttggcgttcaaccttcaagtggagaggttgttgcaccagtcagtggtcaggtcacgatggtggctgagacgaaacacgcgattgggttcacaacgcctgatgatcatttggaagtattagtgcatctcggaatcgacacggtcgacttaaagggtgccccgttcacggtcaaagtggccgcgggcgatgatgttcaggcgggggacgtgattgccaccatggatttagctgctattcaagccgctaatcgtcagaccacagtgattttagcagtgactaacactagtgataaattagaatcgttggacgtcgttacgggggcaaaagctgccggtgacgtgacagctacgggccgtctgaacgccaacacatttaatgctaagcggcagaatcgattaccaaaagcgggtaaatatgatcagttagccgcggacatcgtggctaatgttggtggtgtcgagaatgttagtagtttgattcactgcattactcgcttgcgtttttatttgaaagatgagagtaaagccaatgatgacgtcgtgcgggacttaaaaggggtcatcgacgtagcaaaagcgggcggtcaatatcaggtcgtgattggtcctgctgtcacggatgtctatgatgcgatcatcaagcaaatcggaccgggattttcaaatgattcggagacggctaaagctgttgctgagactgccgcagcagctcagcggccaacgacgccgtggggcaaagttaaatggggtatcagtaatttaattggtgttatcacgggttcaatgattcccgtcattggattattagcagcctctggtattttaaaaggaattcttgcgttacttaccacgtttaatttagttagcccgaccgcaccaacgtacgtgattattaatgcgatgggcgactcggtcttttacttcctgccaatcttcgtcggttttacggctggtaaaaagttaggggcagatccggtgattatgggaatcatcggtggggtgctgacttatccagctattgtaacgatggcaagtggtaaagcgacgagtacgcttttaggaatgggaatcaacgcgaacttctttggcttgccggtacacgttgcctcgtatacgtattcaattttcccgatgattgcgggggcctggctagcaagtaagttggaaccatggctaaaacgggtgattccaacggtattacgaatgatttttgtgccattatttgaagttgtgattgtttccggtgcgattctattattccttggtccaattattactgtgctttcaacgggattggcaaatattattgtgtgggtctacaatttgagccctgcgatttctggcttaatcattggtggcttctatcaagtattggtgatcttcgggttgcactgggcggttattccgattgtggccaacgatattgcaacgacgggtcacagttacttgaacgcgattgtttcagcgacgatggttgcccaggggggcgcagtattcgcaatcgccttaaagtcaaagctggctaacattcaagaacttgcttggccagcaacgatttcagccttctgtggtgttaccgaaccagccatgtacgggatcaacttgaaatatggtcgggcctttgtgactgccagtattggggcggcagttggtggcttcttgaccggcttgatgaatgtcaatatgtggggctttacgggttcactgattggcttcacgtcctttgttaatccgaagggcttggactttagtttttatggtttcttgattgcatccgcagccacgattgtcgtgtccttcgccttaacttggatgtttggttttaaggatgaggatgcaaatgcagttaaagtagcgcctaaaaagcgacacttaggtgcaaccgcctagttaatggcgacgtcaaataattaatcaacgttaggataaacaagtatttttccgattcggaaaaatacttgtttttgatatttagtcgccctaacgaagtgatggtaagtgatggagattggtctaattgtgatgatagaattttaatggatcatgattggacgtgagacggtcgtcttaaggatttttgaaggttaggttaagggttttacatgggggatgacgattatgggaaaaatcgatgaagtatccattttagcaccagttactggtcaagtattgtcattggcaacggttccggatcctgtttttgcggcgggaagggtagggccgggatttggtgttcagccgacagctggtcacatcttggcaccagttagtggtcgaatcacagtagtcacaacaaccaaacatgcaattggcatggtgactacgactggcctcgaagtgttggtacatctgggtgtcgatacggtggcactcaatggggcaccgtttgaagttcacgtgaaggtcggtgatgaggtgacggctggcacactactagtcgacatggatttagctgctatcgagcaggcccacaaaccgaccacggtgatcattgtcgtgacgaacgctcagcgggtactcactgacttgacgctagccccactgccacaagctgtcgcggccggtgcagtcgtcgcaacggctcacttgataacagtgacaacaaccgcgtcaccggtagtggcagcggtaccgcagtcaacgacgcgttactcggcattagccacggcaattgtagctaatgtgggcgggcagcaaaatattaatagcgtgattcattgcataacacggttgcgattttatttgaaggatgaagcactagcgcacgatgcggttattgcgaacttggacggcgtcattgatgttgcaaaggccggtggtcagtatcaagttgtgattggtccggcagtcaacgatgtttttgatgcagtgatcgcacaactagggcctgaatttgcggacggagtgccagtaccaccggttcaggaggcatcaagtgacgttaattggctaagccacgtgcgtaatggcattagtggtgtcattggtgttatgaccgcggcaatgattccggtgattggcattttggcaggttcagggattttaaaaggaatcttggccgcgttaacgggcttcaaagtcttggcggtcacgagtgggacgtacatggtattgaacgcggtagctgatgcaacgttttactttttaccagttgtcctaggctttactgctgccaaaaagttaggttcagatccaatcgtgctggcgattgtcggtgctattcttatctatccaagtctgataacggcagctagtaagggagccacggcccaaatcacgttcttaggtgttccgacgcatttaatgtcgtattcggcatccgtgttcccgatgattgtggccgcatggctaggcgtgtacgttgagcgggggttaaaacgagttgttccgctgtatttacggagcgtctttattccgattatcgaagccctgattttggcgatagtggtattagtggtggtcggtcccttaattacgattatcagtaagggcttggccaacggtttggtcgccgtctataattttagcccggccttatcaggattggttattggtggtttataccagacgatggtcattttcgggctccactggggcattattcccattgtgatcaatgatattgcgacgaatgggcacagttatttgaatgcaatcctctcgattaccatggtcgctcagggtggtgcggtgttggccgtcttcttaaagtctaaggataagcacctaaaggagatctcactggcagctgcaatttcagccttttgtggtgttaccgagccggcgctatacggggtcaacttgaaatacaaacgggtctttgtcgttgctagcattgcgagtggtctaggtggcttactgaccggcctgttgcgcgttaataactatgctttgtcagggtcgttgatcggtttccccgcgtttatcaccccgggtgtcggcatcgggtcaaacttttatggttatttgatatcccattacgggacactagtgattgcaacgatgttagtttatgtatttggtttttcggataagttgttaggtcctaaggaaaacttaaaagcgactaatagtcagtaactaaaataaggctcctgctgaacgtagcgggggtcttatttttatgaactaatcgcttgcaagcgtgcttgttgtcgaatcgcttcaacataaatgcggacaaagtcggtgccatacaggactgctagttgctgttccagatttggtgtgggtggcaacacctttagtaagggtcgaatccattgattggtgggcaatagtcgcaatagatggtggctggtgaactgtgagaataggagattgcggccgaagtattgtccaagatgattttggaaagctggttgcttaactggcaccagttggagactactgttattcatgttgcctagtaacaatttggcctgaccaaagtcgtcacgaaggtcaaaatgctgattcttgtaggccttagcgatttcaggtgctaattggaccaaccaaatgagctgatgttgttccaaatgcagaatcaagcgcagtgtcataatatcagttgtcgtgagttgataactgtattgttgcagagtggctggtgttaattcttgacgcaaggtccgttgaacggcgtcaaaattaccagcctcccaactaatggttaattgatcatggttcgtcagccatagcaaatgatccgcgatccgcaaggtcaaaaagcgcggggcagccgtccccggcgtctttagcattagtagccagtaagagctggcactagaacgcgcaaaattgcgtgctaagacgtgcgcacaggttggcaaggctaattggacagccaattgtaagcgtcgccggtcagtagcagtattaacaaactggtgtgggtcgtgtgtgattcgtcgttttgccatagacatccctccctcattaatacactaccttaattataggccaaaaaacgtggtgtggcgcattgaatgtttggttttaatgataaatcaaatgttattagagtcgtttgattcgctgatattccagttaagaatattaaccagtcaaaactcgatttgtttcaaccaatcgcgcaggttaagataaagatgaaggcttaattgaatcataatatcattaatctacagaaacggggcgatgttgtcatgaaacgaattgttgtgggaatcacgggagcgtccggtacgatttacgcggtcgacttattagaaaagttacatcagcggccagatgttgaagttcacctggtaatgagtgcgtgggctaaaaaaaacttggagttagagactgattactcgctcgcgcagctgacggcgctcgcggatgctacttatcgggctaatgaccaaggcgcagcgattgccagcggttcgtttttgaatgacggaatggtcattgtcccagctagtatgaagacggtagcggggattgcgtacggcttcggtgataatttaatatcgcgggctgctgatgtcacgattaaagaacaacgtaaacttgtgattgttccacgtgaaacaccgttaagcgtgattcatttagaaaatctaacgaagttggcaaaactcggtgcccaaattattccaccgattcccgcgttttataatcatccgcaatccattcaggatctggtcaatcatcaaaccatgaaaattttagatgcgtttcatattcataatgaaactgatcgccgttgggagggggattaagtatggcaacttttacgactgagcaggccgggtatcaaatgcaagcaacactccaagtgattggatatgacttgttgatcgtcgttaccggtgggaccaatccccatattggtgacgtgaccatactaactgccagcacggttcccgaaacggttaagtttcccagccatgatggtcgcttccataaagataactttatttcggaacgaatggccaagcggattcagcgttatctagctggaagctgtacaattactgcgggaattcatgtcaaccaaattactaaagcacaaatagcagctgcggcaccaatgacggatgacctcagccgccagattattagctggttacaggcccatcccgtccaggctgaaaagccggaatattatggacaagatgagcaaccgcggtagattcgtgacgcatggggtgtcgaaaacagcgcaatattgtctttgcgccctattgctggataatatgcaccgagctggccgtttattgttattaaagttgtactagatgaaataattcaacaaaaaaattgcgcttcagatgttgattctgaagtgcaattttttgtccaagttaggcataaacatactagcatgtttgtatttaaacggagtggcttgcagggtgaattatttagtatcgacatgcgcgctggcttccgcaatcgcacaccgtcagctaatctggcagcttatttgtgggcatctttctttgcttgttccactaaaatgttatcgaccacgtcttgtaagctagtcttagctaaccgtgcttcggccgccgtttgcgcgtcttgatagtattgtttcagaacggtttgaatattgccaccaacaatacaatccggattggtcttaggatcgacggcgagtagtggcttatcgccttcaattgcgtagaagacgctgagcagtgaaatttgacttaaaggtttggcgagtgccggttgagcagtaccgggcgttgttgtgattagtccggcttgtcgaagcttgctcatcaatcggcgaacaacgactggactagtttcaatgctacgggcaatggcgtcacttgttaatttagtatctgcgtaaattttaatgtaggctagtaaatggatcgagtcgctaaagcgggttgaaacacgcatataatcacttcctgtaacttaattggttactatgattataaataaatccacttataaaagcaattaacgagtttagtaaagctaatgatgtaacttttataaagatggttgttttgggggaccgaatcagttatgatgtaaatgccaaaattgagcagttactgcaaaaaaggagcttatcatcatgagtgaaattgaaaccatccaggcctattatgcggcttcattggggaaggatggtcgtattacccggacccaacggcaaattttagccgccgcgctcgacttatttgcagaaaaaggttatgaagaagttggcactcgggagattgcagagcgggccggtgtcgctgaaggaactttatttcataattttgttaataagaacggtattctggacgccattatgcagccgattgtgcagaatattttgccaacgatgttgaacactttggaccaggcagttttagatagtcctaaccagactttgcaagcatttgttgtcgcccttgtgcgcgatcgggtcgcatttgtcacacgtaaccgagcctccttagccgtcattttgtcccaatttttcaataatgctcaggatcgagcggctgtcttagggatggtctcacctagcattttggcgcaggcgaatgaagcgatggatcgcttgaaagccgctcgagaattagttgattggccgaatcgcatgattttacaattggtgttttcaaccattgggggatatttagtcgaacaggttctctacccacaactggatgatttgagtgatgagcaattgattcactatctcagtgattttttagttaatggtttgagcccacggagaatccccttacaagatgataataccgcgtcataacaagctttagggatgccaaagtaataattaataatagttgactaataggttaatggtgctataccaccaattggaattaaagtgagtgctcaattaaggggacgcactgttgaggatcacgtagtagtccacaacctgaattctaaaccaatagaagagagggtttcataatgaaatcagcaaaaacgaaggatcacgctaagatgaaagctgccgaagaaaaggcgattcattcaacgggtgccgatagtaagagcttggacgaagtcaatgggagtgtccgggtccctaaggatgccagcttctggcgaactttaattgcctacactggaccgggtgcactagttgcagttgggtacatggatcctgggaactggatcacatcaatcgcaggtggatcacagtacaaatatgcattactttctgtgatcctgttatcaagtttaattgccatgttgctacaagccatggccgctcgtctgggaattgtgacgggtaaagatttagcacaattgacgcgggaacgaacgtcaaaaggaatggggatttttctctggattattactgaactagcgattatggcgaccgatgttgctgaaatcattggttctgggattgctttgaagttattattcggatttccattaattgtcggtattttgattaccactgccgatgtcttgattctgttattattaatgaaacttggtttccggaaaatcgaagcaattgtggcaacgctggttgccgtgattctcttcgtcttcctgtatgaagttattatttcacaacctaatattccagaaatgttaaaagggtatgtcccaactagtcggattgtcagcaaccgttctatgctattcctagcactcggaattgttggggcaaccgttatgccacataacttgtacttgggatcatcaatttcacaaacacgtcaagttgaccggagtgacgaaaaagaagttgccaaggctgttaagttcacgacaattgactccaatattcaattgtcagtcgcgttcgttgttaatagtttgctattaattcttggcgccgcactgttctttggaactaagggtgatcttggccggttcgttgacttgtacaatgcacttggcgatagtaaggtcgttggctcgattgcgagtccgttactcagtatgctctttgccattgcgctgttgtcttctggtcaaagttctacgattacggggacgttatctggtcagattatcatggaagggtttatccgtttgaagatgccactctgggcacaacggttactaactcggttaatctcggttacaccagtgttggcttttgcgatttattatcatggcaatgaagcgaaaattgaagatctgctgacgatgtcgcaagtcttcttgagtatcgcgttaccatttgccatgattccgctagtcatgttcacgagtaatcgggcgctgatggggaacttcaccaaccgtgtctgggttaagtggacggcttggattgtgacggtgattctaattattttgaacatttaccttattttacagactgtcggtctggttaaataagcaaacattaaaatgagctttctagggattacaaggattcctggaaagctcattttgtctttcgggagcagcggcaatgcaagataccgattcaaagtgctaacacgtaacggcaattggcgcttaactgactttggatggccagtcttgcttagttggtatgatggtaaacggggtcgcagtgatgaggtccgtgaggcaggggagcaatccggtctcaaggttatataaatcgtgaacgtgtgcgctagtttgaccatgctcagccatcttaagtagctgggactgggtgaactggagttgactggctggtagtatcaggtccggttggctgcggcgtgttaacggttgagcgtggtcgtgaactaggtaagcaaaattaggcgccgtattaagaattaacgttaaaacgctgatttcatggggatctaatttggttgctaactggttcgtttgtctaggggaataaaccatggcggcgtagatttgaggcgccagctcgggtaattggcgactaggcggtgtcagggtgaccgtcagtcccaattgccagctggcaagcaacaatcccggaatcgttacgacttgtgcggggctcagtagaatggcttgtccggcatgcacgttctgttgttgcagactagtttcacacagtgcgaggtcttctaaaacatcggccccggtataccagttgccatttagatctttcagaactggttcggcatattgacgttgtaattggcgggtaatggccttagtcagctgactcatcgcggggcctcctttaagggcttaagtgacggggcggaaattaagggtggcagtactactttgcgttagtgagatacttcatcttagtgatactctggctactagcatcaatggttgctaacacttgattttgggtggatttaacaacaagcttagttggctgcggtgttaaatcatgtttcggttggctagtcgtggcacccgttgcgagtttagtatcacgagtgactttattgacgagtgtggtggatgtcacttcaggatttgttgtcgtcgtgtcagcagaggcggaaacggaagtcgcaaagagggttccggcagccattagagtaagggttagttttttgaatgtgtttttcataataatcgaactccttttagttgttattattagtgaatgattattgggcagctggcattaaccagtcgttagagagtagttgatggaagtgacgaccaagtgggacccataattgcgaacggcggatgttttttaacgtgtcccagaataatggatcttgtagttgttcatcactaagtttgactttaacgaattcgccctcttcagttttcgcaatcaccagtgggtaggtcaccttaaccaattgaacggcggtgatatttttaatttttggatcagtatctaataacatatctacatagctccttagttgttgtgagtcattctatttttatgagttaatttttaaagttggtttgtttaattgaatgactatagtttaccggcatatcgccgcgggaactatcgactttccataaactttatctaagaaattcttagattcagacttagaatataaaaaataccatgaaaattgaatctgagcaggtaatactttggcaggatcaagtactagttaaattaacaaccgtttcaagactgttaatgtccttaaaacggttgttaagagtttatttgtaaatgaattagcttagtgtgcagggcggttaataatactaatggcaaagcctaataaagcacaaataagagaaacactaaaggaccaggttaaaccatgggcaaaccaagcaggatgtgctggcaagtaagtactaactcgatatccagcatcgatgctcattgttgtaaatagtgcaagagaaccaagtgcgacgcctaaaatattgccaatattatttcccaaagactgtagagaacccgctactcctagctgattttgtgggacgactgacattagtaatgtgttatttggtgcaatgaaaaatccagtgccgataccgttggaaattaacaaagaaataatgagggttaatgaagtatgtgaatctaggaataagaagccaatttgcgtaattataattaggactaggccggttagtagaacaagctgttgagagaaaagatcactcaaccagccaccaagtggggcagcaatagccataataagtggaaaaatcagcattaatattccagtagtaccaactgaccagttcaaataatcttggagatagagtgggaatataaagctgaacagtgcattaataagtggtatcagcattccgactagcaatgctaagctgaaggtacgattcttaaaaatggatagtggtaatagcgcattttttcgatgcttttccaaataaataaagtatagtgtaagtgctaatgtgataatgaagccaatgataattagcggctgcctgaaaccaatagtctgccctgcttctaatacaacaaagaatagtgtgatgataatgaatagaatccctgcgccccaaccatcaagtttagtggcttgttgccggccatgatttttgggaagaaataggtggcctaaaataatggcaatgattccaagtggaatgttaatcataaaaatagcattccaagcaaactgctgtagtaaaaagccacctaaggcaggtccggcaacaaaaccagcggaaataaacattgtattgatacccatggcagttccccgggtgtgattatcaaacagttccgaaattaaaccatagctgtttgaaagcgttgcggcagcgccaactgcttgcacaaaacgagccaatagtagaaactcaaagccgaagttgacactggccattagtgagccgatagtaaagctatacatacctaaagtaaagattctacctttaccccaaatatcaccaagtttaccgaatgttaccagtaagcctgatagaatgaccatataacccatcacggtatatgtgatctgactaattggaaccgcaagtgattttgacatgataggtagtgcgatattaatgattgatgcatcgagattagccataattgtaaaaataccgatgacaatcattgctaaccaagaacgagttgttgttttcatgataaaaattcaacctcctattttttgaacatttgaaagtataacaagttcgtgttacactaacgcaagcaaaatttaggaggatacgagtatgtttacaattacggcgaccgctcagaaatatggtgtgtcgaataatgcactacgttactatgaaagtgttggtctaattggcccgattaagcgtgatcaaaatggtatccgacaattttcggctagtgatcaagagatggttaaccgaattgtacatctccggcaattaggcgcgtcaattaaagagattcagcaatacagtttccgtcctgaagaagtaacactagaacgtacagttgcactaaaaaaatttctgttacgtttaaacggagatctagaagcacaagaggcgcaaattaaaatagaaaaacaatatttaaaagcaaaaatagaacatttggatggtgatattttgagtatgaaatctcataaaaccacgcagatgggttagtagtaattagtttctgaatatcaattcagaatagtcttggaggtatctttgtgattgggtggcacaagaccaaaagcgagtcctagatttttctagtgactcgcttttttatgagagtaattattagaaaataaaataatagtacttgttactatagttgccagctgaccgtaaagatactcccggatggctggttgtcggtaattttaatgttggcctgattcaatgtgactaactgttgaacgattgctaagcctaggccactgccttcgattgcttgtgaccgagattggtcaacgcggtaaaaacgctgaaagacagcctgtttttggtcgtctggaattccctcaccatggtcggctacagctagttcgactgcttgatcagtctggtgcaaactcaaggtaatcggttgatcatgtggcgagtatttatgggcattatcgagtaaggccacaacgatttgttgtaacatttccgcattaccttgaacgtggatgttcggatcaattgcgagcgtcaatggttgatcaattgatggctggtaatgttcagccagtgacaacattaatagtgataggtcttggtcagttaagactagcttagcgcgatcagctcgtgaaaggtgaagtaggttctcaatcagatgttgcattcttagtgattcttcatcaataaactgtaatgattctggaatcacttcggggtgggcgtcaccccgccgcttgattagactgagattaccgcgaatcgcagcaatcggggttcgcagttcgtgtgaagcatcagaaataaattgacgctcatgctgcaatcgttgattttgcgtgaccaatagttcattaaaggcccgaccgaggtcgttgatctcgcgggggctagcaggcacgtctaaggtgggctggtcgctatccggattgttcgatgtgtacttggttgcgtgtaacagtttaatggttgggtcactcagtcgcagtgctaaacgatgggcccaccaagtccccaatgccagggcggcacaagtgacagccagcatgagcagaatcaaaataagcagactgttgaacaatcgccttaagctgacccatagttggtaagtgttatgcccatctttttcactataagataagaagaaaccaaatccgcgaacgtagactaacggccctactagcttagtctgttgcttggtgaaaaacgatttggacgatggggtagtgatgatcgtccgcttcgttttagtggcggtcgtcaaggttgctttcttggtggttacccggataaatgccggttgtttcgtattgcgtgtcgtcgtattgttccattgaataaaactggggacgtctttgatattcgcctggttaagactgctcatcaagtcacgggcttccctagtcgtattgattgtttgctgagtgccgaccatcagaagggtgatcaagctaaccaacaacgtaattgtcagcattagtcggcggatggccttattgatcagctgttcataggtcggagtggtgttatttttgggcatcagacatcggctcccttagtttatacccgacgccgcgcaccgtttgaatgagtggggaggcgccggttgtcgtgattttattacgtaaataaccaacataaacgtcaacgacattttgctgaccgagaaagtcggcgccccagacttggtcaagcaagtcatcacgggtaaagacttcgtcgggatgagcgaggaagaattgcagcaaatcatattcacggtgagttaaggtaacttcttcctgcccgttagtaacgcggtgagctttagtatctagctggacatcatccagttggtagacttgattgggttcaacttgattttcaatgcgtcgttggataacccggattcgggccaataattcttcgatttcaaatggtttggtgatatagtcgtcggcaccattatctaacccggcgactttatcaccgacataatctctagcggtcataataatgactggtacttgatcgtgtttgcgaatgcggcgaagaacttccataccgtcaagttttggcaacatccagtctagcaggatgaggagcaactcgttttgatgcgcttggtaggtttccatagctgccaaaccgttagccgctaccaaaacgttgaaatcctcaaattgtagttctttagtcaagtagccagatagactgccttcatcctcaacaattaaaatcgtgtttttcaatgttatgctcctctcaataaccctggtttatgtctaattatagcgaataattatgacgcttttccgatattttgacttatttttatggatttgtgtgaactaaatgaaagcgtcaccggacttatgctaaaattggactatgaaaatggaaggtaagtgagtgacatgggactttttcgtgacgccatgcaggcactgtatcacagtggtcattatggttacaacatcaatgtaaagaagtcggctcccgccgttgatccgaaggaagtaccagcgattgcggcgttaggacgtattaatcgaacgcccaactttaagacgtggtccgttgattcgccatataaaacggccgaatttacggctaaattaactgacgcagtagcaacttgtgatttggaaatgcaggatcttgagatcaaaccgcagatcgatggtcggtggggcgatcaataagcggaatttgttcccataaattctaatggtcatattaatttaatgatagaccaattaatcaatagtgacggggtgagtcaatgttttcgtacgatcaggtccagcagttaaaccgcttggaaattgaaatttataagtatattgtgggtcatcccgctgaagtaagtactatgacgattcgacaattggccgaccatagtcacgtctcagcaacgactattttgcgttttctaaagcacatgggctatgatggctacgcagaatttaagttcacattaaaagaacagttacggcaagatgccacacaaccgttagctcagacagttgtaccgatgcggacgttttttgaccgcatgaacttacctgatatcacggctaaacttcatcgggtcgcagaactggttcatcaagctcgaatggtcgtactgattgggtcagggacgagtgctggcctggccgcgtatggcagccatttattcgctaactttggtttatatagcttgatgattagtgatacgagtcagccccatccggttcagcaacaggatttatcggataccgtctttttcgcactttcagtatctggagagtctgaagatattattgaacaaagcgtttattatcggcagagtggcgcgaaggtggtcgctattaccgctagcagtcattcgacgttagctgggattgcggacgtggtgttaacttatgataccccggaagttcaagcaatcagtggtggtagcaccttgtcccagttgcccgtcgtttattatctggaacaattagctatgattattcagccattaacgtaaaggtaattcaaaccaatctttggaacatgttctaaaaatggaacaaattccgatggatggaacaacacccattttagagtgaaagggtatacattttgagaatgacaggtataatgaattttgtaggaagcgtattcatgggtacaaatgtcagatgacaggactactttgtaacggacgaactcaattttatgtaaacggttaactattgattgaccgttagcttacttaaattattctgattgtttgagaatgttcgttaaatgaatatgcacaacaaattattttagggggtcacgacatgagcgaaaacaataacaagtcgagctttgttaatgaccgacttgtccctttctttggcaagattgctggttctcgtcacttaattgccttacgtgatgggatgacattggcagtgccaatgattattatcgggtcggtcttcatgatcattgcgcaattccctatcaagggttatcagacctttatggccaatacctttggttcgaattgggcaacgatcgtccaatatccaactaacgcctcgttccatatcatgggcttgattgcggttattgggatttcttataacttggcaaagagttataaagtcgatccaatctctgcctcaattgtttcgttaggcgcttggttcttaacgattccattaaacaccgataaggcaggagcactgtgggtaccattaacccaacttgattcggcggggttattcacggcgctactgattgggttgtttattactgatttttacgttttcatggtgcatcgcaattggacgattaagatgcctgatagcgtgccaccggcagttagcaactcgtttgcagccttagtacccggttttgtcatcttattcttgatgtggttactgcggttggctgttgaagcatcaccaatgcagagtattcctaacgtgatttcattcgtcttagctaaaccattaggcttgttgagtaacacgttaccaggggccttggttgctgaattcgttgtatgtattctttggattttcgggattcacggtgccaacgtggtttctggggtcatgcaaccaatctggttagctgcgatgtctcaaaatgcggaagcgcttaaggctggtaaggctttaccaaacgttgtgacacaacaattcttcgacaactttgtccacatgggtggttccggtgcgaccttgggactggctttcatgattgcctttgttgccaagagtgccgaattcaagacattaggtaagctggttatcggacccgcattgttcaatatcaatgaaccaattgtcttcgggttgccaatcgttatgaactatcggattgccgttccgtttatcttggcaccgttagttaatgttacgacgacttacattgcaatgtcgacgggcttagttgcaaagacggttggggtcatggttccttggacgacgccgccaattatctctggttacttagcaacgatgcacatctcaggtgcggtattacaaattgttaatattgtgcttgatggtgccatctactacttcttcttcaaggccttagatcgtgataaggttaaggaagaaaagacctttgctgctaaagaagctgctggcgaaacggtcgaagcttaagttaaatcattaatgtagtaatcgtataaataccaccattagcgacttgctgaaagtctgttgatggtggtgttttaatgtcgatttttgagaagcgcgtgcagattaaagcgaaccgagtgacttggaattgtcaccgggttcgccttttattaacgggtatgaaattgtgggtgcaacattcgggggtgaccatggtcagtacccttgtactgcaatagccaataagcgttttgcggcaaagcgctacgggcaatgacgtgtgcaacggtgtagcgaatcgtgtcggcattagcgtcagtccataaacgccaagttggtaacttagctgcttgaaccggttcccaatcgcccaattcttgttcactagtagttagtgcggtgagtaaatcaggccgttcggaaccagtcagttcgatgtagtagcaatacgcttgcggatgcagggtgttgggctggctcatgatgagattgctcctttggatggttttaacgagttatcgttgacttaaataaccttatcatcaatcatagtacaaccgtttgactaaattgactagctttttcgcttactgttattaaaatgtaatattcaaacttgcaattaaaaataattgagtgttgcgccttgacctggaacgcgtttcagcacgtatattaagtggtgaaaataacgagggggtgcagcacgaatggaaacgggaattttaaaacagattgatttaacaacgacaacggaacggtatttcttcgtgcaagtacaacgactggccgactatgtctggattcgctcagttcaaaactttaagcctttagaattaacggttcgggtgagtgatttacaggtgaacaagcaccaggccgttgctgaccgggggaatatcaaatatgagtttaacgacgataccgggggactggtgacgcaacttgctggctgggtgcactaagacggtgacagacaagcagtaactgtgatactttaggcaatcaacaaccaataatactaatggcagcaatcaattttaactaggataggactaaatcaggcgcgccactgaaggctataatgcttcagtggcacgcctgattatcattaaaagatcacttggtattatcactgtaagtgattttatctaaaccttgggtgtcataattgagattggttttgccgtcatacacggtattcttggcatttagcttggtttccatgttggtaagggtctcagtactgagccccagttgggtccgaaggcggtccgacgtttgttgcaaggtctttgtacttaaaatctgataggaactcgtattgatccaagcgggtgagccaatgacttgagtcgactggatgtgtttcatattggcacgatcatgcgtcgctaacccaacaaggtcgttaaagctaaggtcagtttgtaaattacccttcagtgaagtgagtaattgattgtagcgactataggtcttagtctcggcgagtttggcgagaaccgcccgcatgacttgttgttgccgtaattgacggccgtagtcgccccgggggtcctgataacgcatccgtgtataagatagcgcctgtttaccattgagatggtgtttgcccttggttactgtgatatggtcgaatgaaacgttgagtggactagtgatcgtcacacctccaacggcatccacgatttgtttgagaccgcccatattgatagttgcatagtaatcgataggcacgttgaatagcttgctaacactagccttggccatcttggagccaccaatattgtaagcggcgttgagtttttgaacatttgtgtcctgatcaccgaccatttctgctaatgaatcgcgtggaatgctggtaatgagcgttttcttggtctgcggattgatcgtaacgaccataatggtgtcagaatttcccttatcaatacgaccgtctgccccggtgtcaacacctagtagtaagatgctgagtggcttagtcgtatcgattttagtactgctgtttcccgtatagatcgtcgactggtagcgcgcctgtgcctggcgaataattaagccaatcgccacgaatgcgataacgataatgatgccgaccgcaattaacactggccgtaattttgaagatgctgaatgccgcatgttcaaatcctcccttaattaaaggcgttaagatggttccccggataacgtctttgtcttgaaatcactgtttctagcatacccggtcagtacgatcccggaaaatacttattttgagtgtacttaatttaaaaaatagataccacctaaaagaattagattggaaactgagcaaattaggagcggtcacttacggacagtattacggcagaaaacggattcttggcttatactgacagtgaacttaaatatatgaagtgaggtttggtaatttgacagtctttcgcgcattttctaaccaagaagttttagattatttagcaacgcaagtcactgacgggcaggtcttcactgacgaggagacgctgaaaaaatactctttcagtccgcggttgaccgatgacgatagtggccttgccttagcctatgtcgaagcacatacgaccaaggacattcaaggaacgttgaaaacggcccgtaaataccacatcgcagtgattccccaagaccaaacaacgagcactgttatcggtgcggacgggttaacggacagtctgattctttcaaccgccaagatgaatcgaatcatcgaaattagcaaggctgattccatcgccgtggttgaacccggcgtcgttaacggtgatctggataaagaagcacgcaagcagggtatgttctacgcgccggaccctggttctaagcccatctctggaattggcggtaatgtggcgacaaacgccggcgggatgagcacggtcaagtatggggctactaaggacaatgtcttaggcgttaaggtcgttttagccgatggtcgcgaagttaagttaggcggtcggacgctaaagcaggcctttggttatgatttaacgcaattgatgattggttcggaaggcacgttaggaatcattaccgaagtaatcgttaaactgttgccgattccgctagggacccccgtgatgggcgtcgcctttttcgataatatgacggccttggctaaagcagtcacggcgattcgaatctccggtgtttatccaacgatgctagaggcattggatggcaatacggttgcggcactcgatcgctacgagaagacacactatgctaagaatagtgcggcgatgttgatctttaagcttgataatggtggtcaggatagtatggcagtcgttaagaagatactggccgaacagcaagccaacgatgttaagattacgactgagcctaaggaacaggcagcgttagaacaattacggcgcgacatgctgccggcagtttttgctggtcagaatcatattatggaagatatggccgtgccattatcgcaattagccccattaatggactatattcaagaactatccaagcggttagacatcgaaatctatacggctggacatgctggcgatggtaatgtgcacccgaccttagtgtggccaacgtcggtaaccgaagtgcctgaaaaaatcattattgcgctacaagaaatgtttaagaagacgctggcacttggtgggacgatttcgggtgagcacgcagtcggaatgttgaaaaatcaatggaacaatgccgaattaggcgaagatgttgatatgttgcaacatcagatcaaggcactctttgacccgatgaatattttgaacccgaaacgtaaaatcaattaacccaacgattacaaagcgcttaagttttgatagcagttgttggtcagatattgcgtaacttggtcatcgtgtcttattattgagatagtcccaaaaatgagttgttggttaatgagtcactaagaatgtgcagtgtggattaaccgatgcgaaggaggccccaagtgatacctaagagtgcacgaatccgaattgaatttgatgccgaagtactccgcaacgagatttttgatgtgcatgatttcgccagttttcaaagcttctggcagcgatttgagaatttcttggctgatcgcatggtcgttggtcacctgaacgtgttagagggccgcggcctgattcctagtgattttgcagatgttgacggacacttagcttaccaagttggtgaagatgcgcaccaaattgcgtatgaccaaattgcgcgtgagtggaccatcacgatccgttaaggtagattgagagagaatagagtcttatattggagcgatattgattgagcacaacaaattcccaagcaagtgcagataatgatcagcttttgccagcacccccggaacttttgcaagctgttgatcagttgaaagcttattcgttacgttatgaagttgcgatgaagctcgttttagataagttagattatattagtcgagagtatgagcttcgttacggctacgcgttaattgatagcaagcagtcccggatcaagtcgcctgagagcattgttggtaagatgcaacgtaagcatttaccgttaacgttaaatgcggtgtttaataatttgcatgatattgcgggtatccggttgattgttcgtttcctaagcgatgtcaagacagtcgagaatttattggcgactcaggctgacattaaagtattacgagtgaaggattatattcatcatcctaaagctaatggctatcagagtttgcatttaatcctcggggtgccggtctacactgttgatgggccgagcatcattgaggtcgaactacaagtacggacgattgccatgaacttttgggcgtcgttggagcatgaattaaattataagaagaacgttccgcatcaggacgcattgcgagcgtcattgactaagaaggcgcagttaattacggagctggatcaggaaatggacgatatcaagcaacggatgtatgaacccaagacgcccccaaaagaagtctaaaaaatgcccgattattagcaggtaattgctaataatcgggcattttggggttttcttgacgcgaatcaagtccatccatgcacatgactggtatcttatatagaagaaagtaattaagaagttagattgcttttgcaattaaagggttcatgttacttttaatatgcaagataatttccaagacatattgataataattaatttaatgggaatagctagattaattaaactaacaatcgaatagtggggttaaattcagtgttcagccaaatttttgactggttttcctcggtaccaccagtcgttgataaaactggccagttcttccggtgattcatgtagtcctgtttttaaccaataacggacaacaccaacgataccattgagataatactcaaacatgtactctttttcgcgattgccaataccagtgatctcagcttggttatgtgctaagatctcacgcttagttgttgcgataaagctcatcagaaaatcctggtcggttgttaagatgaaggaagtaacggcgtggcgtttcttaaccacctcaaaaattcccgtcagaatggcttgtaaagagtcgggattaagatgtttatcaataacagctagcagttcttccgtggcatcttgttccatcttctgcatgcaatctttgacgtcttcataatgggcgtaaaaggtgccccggttgatatctgcggccttgcagacagcagtgaccgtaatctcatctagcgactgatgttggagtaagttgattagactatcttgaattaggcgttcggtcatttgcgaacgacggttgtttttagtacctaccactgaagttcacctcattatttgaacaatatactattgtttgtttatttaatgacgattttatgaaaattgttggttgaaattacaccggttttcatttaacatgttgttattatttaaacacattgttgattaaatgtcacgatgtcgttttaagaatctgaattagggaagggatataacgtgaaagggagccgtagacgttttacaatccaagcgattgtttggctagttgtgatggtagcggccatcatcttcctgccaaatatcagcagtctggtacgtgataagggccagaccaagttgccaagtagtgctaagagtcaagtcgcacaagtcattcagaatcattgggggcgtaatcaaaataatacgcgccaagtggtggtggtcttcaataatggtgattcaccgttaacgagtgaccagaagcaagcaatcgatgggacgattcaacgcttcaaagtgcaaaaatcaaaatatcacgtgaaatcaatgacggctgccagtgataatgctgctgccaaaaagcaattgatttcaaaagacaaatccacccaattactacaattaatggttggtaagaaccagaccgtcgcgaacatgaccaagaatattacggctggtgccaaaacggctggggttaagacgtacgtgacggggagtgacatcttaaatgatgacttcactcaggaaacggaagctgggattcagaagactgaaattattaccgttattttcattttcatcgtgttaacgctagtcttccgctcgccgattacgccgttagtttcactgttgtcagttggggtgtcgttcattatctcgctgagcgttgtgatgaacctcgttaataaatttaactttccattgtcgaactttacccaagtctttatggtcgtggtcttgttcgggattgggaccgactacaatattctactgttcgatcaattcaaagaagaactcagtcatggcgatagtccggtcgccgcgactgggcgcgcgttaaagattgccggacgaacgatcctatacagtggatcgtcactattgattgggtttagtgccctcgggttagcgaacttctcaatttacaagtcagcggttggggttgccattgcggttgctatcctattgctcgtcttgttaacgttgaacccattcttcatggcgttattaggaccacggttattctggccaacgaagaagtttgctggtggtagtacgagcaagatgtggcacggcattgcagtgtcatcagttcgttacccaatcatcgccctggtcgttgttttaggggtttcattgccatttatcttaacgtataacaatgagttgaactatgatacgttggctgaattaaacgacacgattccagcgaagaagggcttccaagttgttcaggatcacttctccaaggggacggctgaaccgtcaacgttatatatcaagacggatcatgccttaaacaatgaaaaagatctaaaagtcatcgacagcttaacgaaacagttacaaaaagttaagggtgttaaaaccgtggcgtctgtcacccaacccggtggctcacaaatcgatcaattatacgttggcaaccaattaggcaccgtcactagtgggatgaagtctgctagcaaagggctaactaagattggtagtgggttagatagcgccaatagtaaattgaagagtgccaatatgtcggatagcgcgaagtcggccaagaagttggcggatggggcggatgaagttgctagcggtgttgtttcatataccgatggcgtctacactgttaacaatggtttgaaccaattgaatagtaagaccgggactttgtctagtggtgttaaccagctggttagtggttcagggcaagttactagtggattgaacacgttgaatagtaagactggtacattagctagtggtactagtacattagcaagtggtgcaagtagccttcaatcaggtttaacaacttatgcgaatggtgtttatgctgtaaataaaggggctaatcagctcaataattcaactagttctttgcagtccaaggtaggccaattgctaacagggactaactcactatatagtggtcttgataagctgaatagtaagagtagccagttggcaacgggtgctaccagtgtggatagtggtgtatccaagttgcaagcaggtgctcagacgctagccgaaagtttgtcaacgatgcagtcaacgctaaatacaaagaactcacaaactactcagacgaatattgaaaatctgacggcaggtcttaagtcaatgaataaaggtatggctaacctagaagagttggcagatagcatgccagagactattagtaaagtagaaagtgctaaaacagttttcgataactcctcgtctacaattgatactgagatgacaacaattaaacacgccctacaagattatgccaaactagaaagtgcgtataagcaggatcatcagtcttcaagttcctctgttgatgccaacacagttgcctcagcagcagttgctgcggctggttcttcagcaacagatgaacaaaagtcagcgattagttctgcagtgtcatctcaagttaatgcgcagactagcagtactagcacttctactgcaacgactgtggccacctcgaccgatgcggcatcaggtttaggagcattggaaaaattaaatacacaattaagtgaattgcaaggggctattggcacattgagcaattccactggggatttatctaagttaagcaatctgtcagaactggcttctaaatcacaagttgctaacagtaatgctgtcaagacaattgagcaattagaatcagctattactcaaattcaagctagtcttgctggaaattctactactccaggatttgttagtggctctaatagtttggtacaaagtttagcaacattaaaggctgggactagcgaattggcctctggcttgaatgaatatacaaatggtgtttcaactgctactacaggcgcaagcactattaataatggtgttggaaccttaaacagttcaataccaaccttgacaagtgctatcagtgcaattagcagcggtactagtcaattggcaactaacacgccaacactaactagtggtgctactcaattagcatctggtactaatgagctcaatagccaagtaccgacactagttaatggtgttcagaaattggcttccggttcatctcaagtaacctctggcttaaccacgttacaaggccaagtaccaacgttagttagtgcaattagcgcgttagatgctgggacgaacaagttagttgctaattctgcaacccttaacagtggtgcctcgcaagtggcctctggtaatgaacaaatgtacaccagtatccaaagcttagtaggtcagatgcagacgctccaagatggtttgaagactgccagcgacggaactaagacaatcaacactggtgttggctcagctaacagttacttgactggcttaaaggattccgcggctgcgaagacgtattacgtgccaaagagcactttgaagggtaagacttacaagtctgctttgaaggcttatatgtctggtaacaaccacgcaacgaagttaacaatcgtcttgaatgaaaatccaagttcgaagtcagcgatggataaagtaacggcaattcaaaagcaagcgacgaatagcttgaagggaactgcgttagatggtgccaccattgcgattggtggtcaaacgtctgaaacgaacgatacccaagcaattgcttctagtgacttcgttcggaccgctgcaattatgttagtcggaatcctgattgccttgatggttatcacgcgttctgtcttacaaccgttctacatcttagggactttgttattggcttacattatgtccttgagtattacacggatcttgagcaactggttcttgggtcaaagcatgttaacttggaacacaccgttcttcgggttcatcatgttgattgcgcttggggtcgactacagtatcttcttgatgatgaagtatcgtgaatttgataattcggctgcgacaccaagtactcgaattgtcagagcttccgctgtcattggggccgtggtcttatccgctgccttgatcttgagtgggacgttcgcagccttgatgccatccggtgtcttgacgttgattcaagtggcgatggttgtgattatcgggttgattattctggtattcgccatcccaacgattattccaagtttgattcgcttaacttatccgttgacggatcgtatggaagacgaaaccactgctgaaaagcagacgaaacgaaatcgtcaataaaataagtcagttatgcgataataagtgtaaccaactggcgccgtctaacgattcaagttggacggcgcttttttaaggggctgcacttagattttaaaaacagtgttagttttagtctaagagtatgcggcgagtatgagatagccggattggatagtggcgataaggagatgtttttaatgcaacgatgtgcatgggcggattcatcaccagcaatgcaagcgtatcatgacaacgaatgggggcggccgcaacataatcagcaacgactttttgaactgttgtgcttggagacttatcaagcaggactgagctggcagaccgtcctgaataagcgggcggcttttaatgaagattttgcggattacgatgttgaccaggtggccgctatgacgaccgccgatgttgagcgactactaaccgatgctcgaattattcggcatcgtcagaagttaatggcaacgatcaacaatgctcgtgtgattcgagattggccggccggggaagactttgccacttggttatgggcgtttgttgataaccagcccatacgccaggcgtgggcgtcaatcgatgaggttccagcaacaaacgacttggcgcaacaagtgtctaaagagatgaaacgccgcggcttcaagtttgtcggaccgacaaccatttattcttatcttcaagcgactggtctcattaatgatcatgtggtggactgcccatttgctccagaaaatttaccggcctaacgcgcttaattcctggcgcggtgagtaagtgagccgtcaatttaaaaccagcgcgatgacaactgtcaggcgctggtttttattaaaatcaatatgttttggtataagtgcgattgcttaaattttatgtataaataaatacttattataaccataaaaataattgacatgacgtcgcttaatttgctaagatacggcgtaagaatagctgcggaaggcaagtgatgggagcgacgttaggtgaaagaagtaaggttttggggactcttgttaggactgtttgtctgtttaggggcagtgataccgttagttagtaaggctgacgtatttgatacggcacccgctggactgaatctggaaggcttatttgaaccgggaaagtttgaccgtaattcggccacaatgcagactgtttcaaagaatggccattcgcagcatgttatcgaattaacaaatgacgataatcaagttggggcaatgtggtcgacccctgttaatcgctttaacatgcgggtcgataaccaagtctcaatgtgggtgaactttggggacaaagccgtgagtgaaggactggccgttgttttacagaatgatccccgcaaaatgagtgcgattagtcggtatggaaagaaaagcattattggtgagaacttgggtgtttatgggacggatacctatacacggcgaacggcgccggccacgattgctaagacggcgattcaaaaaagttgggcgttggagctggataccaaagtgaatgacggtggtttttggggattgtatccccgggggaattctttcgatgaaaagcctaaaaaaatgcatatggccgcgagctaccctgcaagtccggatacttatacgcaacggggcggtttaacgtcctcttatcgttttgaacagaaccatgggagtatcgctgataaattaccactcgcggacggtaactggcaccatcttgtattgaagtgggtcgccagtaaacaaatcatgagttataccctggatcagggaccaacacgaatgaccacaattgatacaacagtctttggaaaggatatccggaatgttacttggggattaactagtacggcgacaaccgctaatgccagaacactggtcgtctttgaccggttgccacaaccgattgaaatcgagtcagatttaaacgtaaccaatctgactcaagagcgaactgtccatgaaggagactgggttcatggtggggatgagttggaatatgagtacgttctgagctatctcaatggtgacaatgaatggcaacaggttaaggccagcctaccattacccgaacaagttcactttagtcacgcgaagatccgctatgcggatggtaccgaggaagagatcaatttaccagcggacgataacgaatcgtcggtggcccgcttacaacacgatttgcagcggacactatcaatgaaaaatccgcacgcttatattacgctgattggtgaggctgccaaggtcgatggggatacttttgttgatgatgacatgagttactttgagggtcacgagatgaagaccgcaacggccacaccgcacttcaccattacgaccaataagaccgttaacctgacaattgaaccgttgacacaagtgaagaaaggcgagcccgtcatcattaagggccaaattaagctaaatgatgggttagactttgacaatgatggcatgcgtatcgagtaccgggtcaatggtgaagcgggagaagactatcagttgagcatggacgatccggttggttatgtcgaatttgaagtggatgccgaagaactacaaatcggtgaaaatcagattacgttacgggctcatagcaaagataacgcctactcagaaccagtgacagtaacggtcacggtcattggtggggagttacagctgaaaaaagtcagtactgaaagtgtgtttgcaccaatcaagctgacgggaacggctcaagtcagtcggcccgagggacttgaagtagttgtcaatgatgatacgggctcgaaagccgcttggcgcttagaggcgaccgcgacccctctcgtgactaatcagggccgcacactagcgggaaacttgtattatcaggatggtgccaagctgacaatgttgggagaggatgccgtggaaatcgcgcgccaaaagacggccccagggatcgactatgacgtgaccgcccactggtcatcgcaacaaggtttggtgctcaaaacaacgcccgccgctgttcctggaagttatcagggtacgatcacgtggcacttaagtaccgtaccggaagagtgagtttacgattgtgtaagtaattcgtttaatcaataagttcaatagtcgcgacaagaattaattgctaattcttgtcgcgactatttggtgttcagcgaaagtgctgactaacgcatttaaacgggcctccgatacggtgcaatgctagtagtagcaagcacaaccagcctttcaggggcttagctagcaaattgaaaaatcttcggtttcagacccataaataaacccagcaagttcacaaattagtcagatttcccgtgtaggttaaaagcagtgcaaagcaattgtcataccaatactttatctgaaggagggtttaagcgtgaatttttttaaacgcgcatggctcaatctaacggcaaaaaaaggccgttcaattctattagtacttgttacatcagcaatcatgctgtttgtattggccgggttattgattagaaatgctgccgatacggcaactagtaatgccaagaaaagtgtcggggctaccgtcactttatctgctaaccgggaggcggcttttaagaagatgcgcagcgccacgtcgacgagtaaaagtagtcggcctaagttgacgacatcgcccgttaaactgagtgatgcgaagaaaatcgccaagcttagcaacgtttcaagttacaatgcgaccgtctcaacttccgctaatgcgaagggctttgatacgatttcaacatcaggtagtagtaccggtggtgggatgaaaggtatgggtggctcaagtagcagtggtactggtgatatctcgattactggggtcactaatacgaacagcgtctcaacctttgaaagtagctcaagtaaaattacgaagggccgcggtattacagctagtgatgaaggcactaacaacgttgtcatcgaaagtgaattggctaaggaagatagcctgagcgtcggtgatacgattaagttaaaagcaacgaccggtgataagaagacttacacgatgaagatcgttgggatctataaagcgtcatctagtgcaagtacgcaacaaggtcctggtagtaccgatgtcagcaacagtgtttacacgtcatacacgttcgctaacacggtcaagggttctaagtacaagaacacagctgattctgtgacttttgcaatctcagaccccgctaaagttagcagcgtcaaaacgtctggtaaacagttgatcaatacatcgaagtattcgttgtcaacggatgatagcagttaccaaacggttaagagttcgatgaataacgttaaatcatttgcggataagattgtctggctcgttgcgattgctggaacgattatcttagctttaatcgttatcttgatgattcgtgaacgccgctatgaaattggtgtcttgttatcattaggtgagagccgttggaagattgtcgctcaattctttgctgaaatggtgatggtcttgatcgtctcagttgtcttagccggattcggtggtaagtttgttggtaataagctgggtgaccagttagtttcacaacaaacgacgactgcaacgactacgacgagttcaactagtcagcagggtcagcctggtggcggtggcggcgcccctagtggtaacactggtggtagcaagccaagcggcaatatgcctagtggcggcggtcagactggtaatgccagtgccacgaccgacacgaacttagatattaatgtcacggtaatggatttagttgaactcggcggctttggcttagccatcatgttcctgtcgattatgctggcttctggtggcatactacgactacagccgaagaaagttttaattgattaggaggggcggcaatgttaaaagtaaatgatcttggttactggtatgaccgccaagaaaatagtctatttgagaatgtaaaccttgaatttaagtcggggacttcgtatgccattgttggtcaaagtggttccggtaagacgaccttcctctcactgctggcgggtctagataaaccgcgggctgggcaaattgaactcaatggtgaaccaatcaataagattggtctgacgaactatcggaagtccaaagtggcaatcgtttttcaatcatataatttgttgacgtatatgtcaccattgaataatctgatgactgccatggcaattacgaactcggaacaccgtggtgacaaggattatgcgatgaagatgttacgacggttaggtattacagatgatcagatgaagaagaatgttcaacgcttatctggtggtcagcagcaacgggtggcgattgcacggaccatggtgtgcgatgctaaactagtggttgcggatgaaccaaccggtaatttggatgaagaaaatacgaaatatgtgattgaccaatttcaaaaaattgcgcatgaacaaaagaagtgcgtcattattgtcacgcatgaaccggatgttgcggacgtttgtgaccactcctaccgattagaaaagcacaaatttgtggcggaaacctagggtgctcttacgattgaatcagacgtgagttgacgcgtacaatcgcatttttgtcaagataagtcactaaaaatgagttctcagaatgatttgattctggggactcattttttgattactgtgaattgctaacgagacaacaatcgtttttgagggcgaacttgccagcgaacgataaaggcgatgatgataaacaagacgagatagagcaccgagatgccaatcgcgtaagcaaccggaatactcaacttggccgcggtgtgggtatgcgtggccaaactaacgacgacggatacgtccgataaggcgtgcaagaaaatcggccagactaagttattggttcgtagataaaggccgcaaaaaatcaggccacccgctgcagcataaaagacttgtgggatgacgtagctgagggtcagctggctgctgttaatgagtaggtgggtaagaccaaatagtaaactgtcgatacaaatggctagcatgagtcggtgagggaagcattgtcgtagtagtggcaggagcatgccccgatagatatattcctcagtgatcccgataactagggcgtagccaatatagagaattaacgttggggtccaagcaagatgacatagcttgatgaagttgctcgtcattggtagtaataaaataataattcccgggatgagctgcaagcattgtcgtacgagtgattgcgattgccaccactgaatcgatattttaaaccaaaaatgatttaatagcaggaaaataagtaatacaagcaagtcttggaccagcccactgtataaagttggtactggtagccaggcaattaatttaaaaagaattggtactaaaatgaaaatactaatagcggctccccagccgcgtttggttgatgacatcgaaatcccctccagaagttaatgctaactttagtataggtcacattgaaggtgttggttatattacttacggatcgattagttgccggtggtcattatgacagccactggtgattttggcgtagaatcggcagtattaataggataatgaccgcgatttcgatgatttgaaaactagtcgtcgttataccgggcaaattgattggaggttccatcatgctaaagaagtcattgacggtgtgaatcaacaatggccatagtagcgatgttgtctgtgccgtgattaaacataatagtagccccagtacgaacgtaaagcccaattgcaatagggttaaactaagtgtttggtgaccaagattgattagatgggtcaaactgaagaggatactagtgaagactgcagctctacctacacccaatgttgactggctggcctgaaacaacattccgcgaaaaaaggtctcttcgaacaggctgatcaatatggcaacgaataacagggtcagggtgtttgtcagttgttgggcggttgctaacgtatataatccaattagtgcggctacgattaaggttggaatgatgggccggatttgccgacgccaagttgccgataccccaaaatttaaggtttgccgtagccagtcacgatttaatatgagtgcaattgctaaaaagaacagttcttcgaccccagttgttaatgaggatgggagttgggttaagcgtggtagctggaaaatcaggccaatcaacaacatactgcctaacatgccaccccatagtgtgatgactaatttggtttcgtggcgcatctcctcagatccttcctcgtattctcgctactaagcatacgccttttaaatgaatctgagcataaaaaaacagcgtaacgacaattaatgtcattacgctgttcgttagtaatcagttattttataaagcccaagcagccatgccttgtgcgttgtataagctaacggcagcgttaacttggtcttcaacagagccactgctgatgtgcatgttttggaataaaccataggcaccagaagtactgttcttgaccgttgagttccagtttgattcacgcgtgatgatcgtgttccaagttgaagctgaaacgccagtccgtgattgcatttggcttaatacgtagctctttaagttactaccagtgtagcttgaagtcgttgaggttgttgaagctgttgatgatgcagctgagctagtagcacttgatgaagcttgactagtggttgcagcagaacttgaagcttggctagcagctgattgcgttgagcttgctgaagaagcagcactcgttgcaacgcttgaagtagcttggctagcagctgaagaagtagcagcagaactagtagcttggctagcaactgattgtgaagaagcactagtagcactggcactcgttgcagttgaagcagctgaagaagtagcttggctagttgctgattgtggtgcagcacttgtagcagcagaagtcgtggttgtagtagtagtaccattgacttcaagcttatcaccaatgaagattaagttaacattagctaacttgtttgccttttcaatggctgaaactgaagtgttgtgagcttgggcaattgctgaaacagtatcgccggccttaacagtataagtatcagcgttggcaaccgttgttgagatagcgaataaagctaatgcagcagttgatgataatacaaggtttttgatcttcataataattaatacactctcctataatttgcgtgtgttcgattatttacatatattttctattggtcgagcagttgatgtctcaaccaatcaacagtgactagtataactagtgagtgttgcagtgcaataatcagaacattacgtttttaggggttgcttgtaatataaggccgtttttgtaatgaattgtaatatttgagccggatttcatgtaaaatagcgctaccaatcccgattaactagctggaaaatcaataacgacaatgattaagcggggaaactaatgatgaaaattagccgctttatccgataaaagtgatcacttttggtcgatttatgaaaagtcaacgaggattatcgataattttaagcacttaactagtgaattttgacgggttaatttgtcgggaagtcggattatagtgacacttaactagtcattttattgcttggagacgtggcactgactaattatttttcggtaaagcagataattgatagaagttgcgcatcgtgtagtcacttgtggtcggttaacgaaggcgtcgattaattaagtattactatagtaggtttatgccaaaagtagcccatgacgatcgctactaaaacgttactaggttagtattacgccatagctgaatggtatgtggttgtcgttgtggactagtcgtcaaactgtcgggggttcgggactgtacttagtcaggaaattagttggattttctccgttaaggttggtgaattgttaaataaaaacatgtggtattttggttgggagagtgggtcgtcgattgggggagacaactagcaggtctggatcgtgtccgtcttaaagcggttgctagaataagcatatcgcatatctaaataacgggttgtcagcatgctaagtgctaaggcctattataaagtcacttagcaactgagtaactttataatgggtattggtgggggacacacgtgcttcagcacggatttaatagtagaaaaaaagattgcgaatcagaaatgatccgcaatctttgcatttatttattaatttaaagtggctttttagtaccagccattagcaagccaatgactcttggcgttgctccatgaaccataacgtgaagcaacataactgttagcaacacgttcttggttggcagcggagtagtcaccgtttaagtatgaagcacttaattggtacttaccgatgtattgaccgttacgagcagaatatgaaccaccagattctttaccagcaatccaagccttagcagcactatcagaaccattgttgctatagtttgatgttgaactagacgtttgagtcgtcgtctgagcagcaggtttgctagtttgtgtttgacttgattgggtctggctagcttggctcggttgagcttgagtttgactagtctgagctgatgattgtgtcgtagtcgtttgttgagtcgtctgtgttgaagtcgtggtagtgctatcaccatttacttcaagttgttgaccaactaagatcaagttaacgtcttttaagtggttagcttgttggatcgcatcaatcgtcgtgttatgatcagcagcaatggcagaaaccgtgtcaccggctttaacagttaccgtagcagcttgagcggtagcaccaatggcaaagagactagcagtagcggcagcagttgataataaagcattcttaatcttcatttgtaatgtacactcctattttttagtccgaatttggcttggccccgcgaatcttccaagcactcaatggtacctagtataactggcgattgtgacagggaaatagcaggagttttacgaattaccctaattcttgtaataaacggcgtgttttgtaatcttttgtaatataacgcgcggcgcaattgtttctgagcgggtcaatcaaggctgtttacaaatgaagacggtgtctgttggttaacataaccaaatgttgtgattaaagttcgaagcgtgatatcactgggactggcaaccgctgatgtcgtgactaagcttagttaagccaatttacgagttcttttagtggaaatgtaagcgtttgtttgaatgtcagccaacttacttttggtaactcgaaattagtcggcctttaattggaccagccagttgtcggtttgtttattgttaatgagcgattggggtgccgcttgtaggtctttgttaagcttctgaacggtgccaccaaagggtgttgacaccagatgcgccccttgatcgtccgtaatcgtgacgagcggatcacctgccacgaggtgctggcccttagttggtaaatcgagttgatgaacgacacctagattgtgttgtccttggtcacttaaccccagtagaagccggtcatgtgatttggtcttcagccaaacgtcgccgtataacatcggagcatgttgctcttcgtaatcatgacgatagaaatggatcatttgtttccaagcagattcttgttttgccatcatttctcctcaattcagtgctagtagtcggtgcatcaattgaaagtggtgcatgattgctaatttcttaattattcctaaccctgggaatttatcaccctcagcgtaggccaatagggtggcaagcgcgggggtgcgattgagtcccgtcaggtgtgtgggtgaccagtcggtgagctttgttaatgcttcaaaaaacttttgcttttgaccacgcatattggcattgctgtccgaaacaaaatgatggatgcgcaggtcaccgttaaccgtaacataaataagatgtaatgcaattgcgcgtgatggcataccgtggtcaaaatagggtcggcccatgagtgagtaatcgccaaaaccatcaaagccaaccggtgtttggtgccagttagcgggggcaaaataggcgtcagttatttcttgatagtccgcaacgtgcgctggggttgccacgggatcagtcaataagaccgcgtgttgtggtaatagttggtgcaaacgcgcttcatcagggattaggacatgaccagcatgctgtaaagtggtcgtatgctgataggccttaagcaacggatagttaggcgcgatgagcaagcttgtttgaccaggagtggttgtcagaaagtcgcgactaaaatcagccgcaagaattgcgcccggccggtaaaatgggtagggacgcaaatccggaagtggatggagcttaacggtattaagaccatagacactcacttggggattcgcaataatgctaaatggttgttgggcttcaataaaagtcgtgactatttgttgtaattctttggagtcacggactggttcaattactgggatgatgtgtgggccaagttggtgttgctcgcacaatgttcttaaggctaacaaatcatacatccgtccacgtagataggggtagtaagtgctcataactggtcacgcagatctggtgccgttagcgcctgatattttagtttgagtgcctgatattcggcattgcgggcatctaattctgtttgtagcgcagtcaccgcgtcattctgggtgtcatcgatgaagcgatcgtacaagttttgttcaggatcataaacgtcgtagccggtgcgggcccgtttgcgtaattctttgaagagttggtcatcagagtagagctgtagtcctttcttcacacgcttggctttatcgacctcacgaaagagcgacgtgatgaagtgactgataaggggcgtttgctcgacttgtaagtcttggcgttgggctttcttagcgacagttaggaaaccaggcgttcgcaacggttggggtgcgagctctagggcccgctgatcaaaagcacggtagatcaatacaccaatatggtctggaatttccgattgaacttctaggtaaagttgttgcggcaagacaaagtaattgtaatgaccgataaatgaaagtttggcctttgaatgaaaatctgctttggtgactttcaattcgtagcaacgccattcaatctgaccatcggggagttgttgatagcttaatgtatcaacgatccctttatcagcgggcatcgcaacttcttcaaccacgtaggcgccctgttctagacagtactgatagagagtactttcaagttgtttagttaatttagtcttcattaatgagtcacctccatttggtgccaaaagttggcaatcgttgcttcgagctgcgggactgattggatcgtctgatagtactgccaatgtgctggaaataaatctgtgtagcgccgactagcgaagcgttggtctaacaagagaacgattccggtgtccttggcactgcggatcaggcggcccgcagcctgtaagacgttgttcatgcctggcagttggtaagcgtaggcgaatcctaagccgttttgatggtcgtagtagtcacgaatcaagttcgtttcagggttgatacccggcagaccgacactgacgatagcgactccaatcaaacggtcgccacgtaagtcaatgccttcggagaagataccacccagtacgcagaaaccgagtaaggtttgcgagggggctgactgaaactggttcaaaaaggtctgccgggcagttgcatccatcgtcgaggcttgggcggtagttgccacatcagggtaggcggcttcaaaggcagttttgatctgcagcagatagccatacgacggaaagaacacgaggtagttgccatgtttagccgtcaacatggcgtgcaagctggcaataatccggggcacgttatgttcgcgttcgtgatacgttgtctggacgtactgggtgacgagaatggcctgatgctttggtggaaatggtgatggaagctggtaggccaaactgttggcttcaccgccaagcacccgctggtagtaagccatcggggtcagcgtcgcagaaaataggacagcaccactgccgagctctaatgaccgattaagaaagtcactgggatctaggcagagttccttgatcgttaagtgatgaccgtcaaggacgaagcgcgtctggtagctgccatcatataggtcgccaattttaacaaaggtcagacaggcgaagaaatagtcacggacggcgtcgagcagtggccccggcttttgttgcgccaaccagtcagtcacaaattcattaaatgttctgagggtgcgtaataatttgtccgggggatcaggtagcacctgttccgttacttggtcatcaatcaaggttttactgatgcgcgtaaaactacgccggactttcttgagttcgcgttgtaagtcgtcacttggctgacttttatcgggcttggctaattttagcaacgcactgattggctggtcactaacggctgcagagtacatatcacgggagcgactaacaaggttgtggacttcatcgataaggaaaaagttgtcgtcatcacgttcgctaaagaatcgttgtaaatagactaatgggtcaaaaagatagttgtagtcacaaataatcacatcacagaagagcgacgtgtcgagtgaaaattcaaacggatcgacagtatgcttgcgagcatactgttcaatcacggaacgggtaatctggtcttcatgggtcaacagatccttgagtgctggtttaagtcggtcgtagtagccaatcatataaggattatcttccggaagtacatcttgttcctcgggaaaccgaatctgatccttggcagttagcgtaatgcttttcagtttgagtccgtcatgactcattagcgtgaccgcttcttcagcaacgtggcgcgtactttgcttagcggtcaggtaaaagaggcgctcaatcacgtcttcgcccattgctttgatagccggaaatagcgttgagatcgttttccccgtcccagttggtgcttcgacaaagaggcgtttttgcaaccgaattgtcttataaacagcgccagccaattcatgttggcccggccgaaaagctggaaacggaaatggcaagtcttcaatagaagcgtttcgttgtcgtcgtaaatcggctcgtaatgtcaaccagtattcatattctgtaattaagtcgtggaagaatgcgtctagttcagcccggtgaaggatttgctgggtcttcgtgattttttcattgatgacttgaaagtaggtcagctgcaacgtgacctgctcaagatcgggatgttcttgcagtaacaggtaaccgtagactttgatctgcccccagtaaagtgtcaacgtgttggtacttaagtcctcgaagacttgatcggatgttttgatttcttcaatcaacgccccatcatcatttaactgaatcccgtctgcccgacccgcgataatgtaatcagtatcgttcatcgtcacaatttttttcaggtaaacttcgctatcatagtcttcaccacgactactctggagctgacgatgaatcttagcaccgttcaatgcagtgttctggctattctttacttcatttaaatcgccttgtcgcaagacgaattctaccaattgtcgaattccaatcttagttgccatcggagcatcccttctgaatttagtcgcttcctattataaaacatctgttcgtgtttgtctgctgttgattgatgatgccgggcaaggctctgtgatatggccttaaatgattgttaagccgcggcagaccagtatttaagacgcgggcttcgacggcttggatctgggctcatcgtgttccagcaattggcggaaatgcctgggagtcaatgtaggacgaactagccagacaggttcacgccattccgaattttttccagcgaatcttagctggtcacttttgcctttgaaaaactgatacaggttaacaatctggattgaaagctaaataaaaaagcatcgcgataagggcgccgatgcctgttgcgatgtttagattgacgattttgatttagaagaaaatgaatcagactaggaagttaatcgtaccaatggctgtggtgttggcgaatgctcttgcggagactaaaaccgtagctgatgatgccggctgtgataatggtcgctaaaatcgcaagcaaccatgaaccggacgtgctaaagtaggtggcgtaaccaaggctgagactgactaatgtgatgacgggaattagaattctcacaggggctggatgtaagaagacgacaccggctagccacagagccgctgctgtgaccatggcgtcgacactgattggtgaaccaaagctaataccaagagtgatgatagcaaggattgttcccacggtcaggaggaggacggcaaagccgttgctgacggaccaagtaaacgtttttttcatcatgatcgcctcgctttctattaactatattataggctaatttcgccttatgaaagaaataatatgccgacaattaagcttgcaatgttatgaaaattgaaagtttgtgaacaaatccttgaaagcgtatccactattagttaaactggcattaggcacacttgatgatggatggaggaaaaatagtcatggcaaaaattttagcaattaacgccggcagttcaactttaaaatggaagcttttcagtgttcccgaagaaacggtaatcgcatcgggaatggttgatcggctgggattgccagattccgttttcacaattaagaaggcggatggtagtaaatattctgaaactaaggatcaaattgatgcaaaagaagccgctgcaatggtcttaacacggctgaagagcgataatattgtgactcatcttagtgaaatcactggggttggtcatcgggttgttgcgggtggcgaagatttcaaagactctgtcgttattacttcgcaaaccttgaaaaaaatcaaagacttatctgagtatgcgccgctacataatccaacgcaggcttattatattgaagtattccgtgatttattaccaaaagcgactcaagtagccgtgtttgacacttcgctgtatgcggatatgcctaaagttaattacctatatagtattccttacgattattatgagaaatttggcgcgcggaagtatggggcacatggcacaagtcatcgttacgttgctaatcggacggcccaactattggggaaaccattggattcgcttaaattagtgacattacatttagggtcgggtgcttcgatcacggcttttgatcatggtaaagccgtcgacacttcaatgggctttacgccgctagctgggattaccatgagtacccgttccggtgatattgatgcctcaattattccattcttgatgcgccatttagggatctctgatgtggaagactttgttgatattttgaatcataagtcagggttacttggtatttcaggtttgtcacctgatatgcgtgatcttgataagacgcaagatacccgtgaacggtcaaaattagcaattgatatttttgttaaccgggttgtgaagtatgtcggcagctatattgctgaaatgaacgggattgatgctcttgtcttcacggctggtgtgggtgaaaactcatggatgatccgcgaacgcgtcactaaagctttaggatactttggcgtgacagtggatgatgaaaagaatcatatgcacggtaaggaacaaattattagcaaagatgacgaaccggtaacggtcatggttgtcccaactaatgaagagttgatgattgtgcgtgacgttgaacggttatctaaagctgaataaatgagtcaattaaaaacgcgtgattcggattgtggtccgagtcacgcgttttgagttttggattctaatcagcatagcgttaagtcagctcttgtccccgcatatgtgccgatgtgatgtgctgctcagctattggcgttgtcgcgcaggtttagtcattttgatatggggcgtgtggttgaatagaaaaggggtaccgctcgaagtgaagccgaaatgctggtaaaatccttgtactggcacttgggcttcaatttgaattggcaaatcagcatagtgttcctgtacgacctgttcgatatgggccattaaatcagcgcccaagtgttgtccgcgttggtttttgtccaccacgacccggccgaaggagagatggtcatcttctgtaaagattcgtgcgtatgcaataatattttgattgacggttttaaagacatgataagcttttaaatcagtatcgtcgacttcctgatagatgcgttgttgttcaacaacaaacgttttgacgcgcaattcataaatagcgtataattcagttgttgttagttctgagaatattttaatcgaccacatggtgatgcctccttagcatagtgctaagtttatcatcaaatgattgcatatgcaataataaaaaggagcttctatgataccaacattaagattgatgggcacgttgtcgcgaatcgtcacgaacgagggtaatcaacgttttgcgaaatacggcctcaataacaatcagtttatttatttaattcgaatttgtgagcagcctggcctattttttagtcaattggctgaccaaatgaagatggatcgaaccacgaattatcgcgccgttcagaacttaataaaaaaaggttacgtgattaagcagacacatccagagaataaaaaggtccggtgtttgtacccaacgagcgctgggcaagcgttgtacccggaattgcatgcttatgagcagtggtgtgcagacttggttggtgagcagttaacgccgggccaacaacaagttttgtttgaaagtctgtcgttagtcacggctaatgtcacccagcatattgagtaagtttaatcactaaactagattaattgtgaacaattaaaatggcgtggcgttttagctgaattttaggcgtgaagagtgtaccatgtagttatcaagttataactggattaatgtgatcaacgcaggttagcacaattgctggacaggcggcattagtcaacagggataatgaaaggggttaataaatcatggcaacaactttggtgttaggtgggggttacgcagggatgcgagccgtcaagtttttacagaagagtctaccaactgaggatgaaatcattcttgttgatcagacaccgacgcatacggagaagactaatttacacgaagtcgcagcggggacgatcgcacctgatcgaattacttatcagattccagatattatcggtaagcgggtccagttcgttcaagcaacggtcaagagcgttgatattgaacaaaaacaagtgacctttgaagatcatcctgaaatgacctatgactacttagtattagcattgggcttccagtcagaaacatttggggtagctggcgccgatgaaaatgccttgccaatggatgatttggcaacttcacaggctgtttatgaacatttggaagaacggtttaaagcctaccgtaccagtaaggacaaaaatgatttgaagattgcggtctgtggtgctgggttcactggaatcgaattattaggtgaactgacccagacgttaccaagattgcaggcaaagtatcaaacacccgctgctaagttagtttgtttggaacggatgccatcaattttaccgatgtttacgcaggaattgcgggactacgctttgaagtttatggaaaagaataatgtcgaaatgcggttaggtgccgttattgaggccatcaagccgggcgctgtggtttacagtgacgcggacaagaacgaacatgaatttacggctaacacgattatttggacggttggtgtcagtggttcgcacgtcattgctgattccggttttgatcaacgtcgtaaccgggtcgtagttaagcccgacttatcactggaggggcatccggaagtattcattgtgggggatgtcgctgcagtgatggatcccgaaagcaatcgaccatatccaaccacagctcaaattgcactggcagctggcgaacaggctgccaagaatattggcgctttgcgtcataaccaagcaacggcaacgttccactatgaatctagtgggaccgtggcctcattgagcgatcgtgacggtattggtgaaatcttcagtagtaacaaaccggttcatggttacgcggcatcggcattgaagaaaattattactgaccgctcacttttggaaagtgcgcatttaggaacggtcttcagtaaagggcgttttgacttatatcattaatcattaaattaattccagtagtatgataaatagccaccacagaaattcgatttctgtggtggctattttggactagttaaccgtcgaatggctcagctggttgctgattcgggcaattaagtaaccagctgttgggactaacgatactttacgggcaccccttacaatgaaggcatgataagggggcggtcaaaatgacgactaaatcaatacgaacaccaattcaaccgtggtttaccctagtggtagcgggcagcttactgataaccttgttttctaacacactttggtggttggccagcagtgcgttttgcgcgctactcattttaaacttacaatttatcgtctttccaaccaccgcggatcgttattggctaaatcggctcggtttaggattagtgctagcgctagtagtgctcgcgaatattaaatttttaatcattagtggtctgacatggcggtaagcgcctaaacattaaaggacctgacttgaagcactctgttggggtctataatctttagtgttgatggataaaattcatcaacactatttttgtgtcgtataaagtacgatttatctatcaaaattagaaaccaaaatggctgttgttgttaattcaagtaaaagtgcaatgtgtttcccacgggaaacacattgtgatatagttattacaagtgaaaattcgattgtgagttggttttgaatgtcccaagaggaagacgtcaaagcgattgttgctttgataaagttgaaaagaaacaactggcaaattagtcatcgcgcaaagaattattcagcagcagtaacgttaggtatggatttagatggaattttagacagtatatatcaacaaattacatggcgcgattatgttaatggtccaatggcggataatcaccaccccagaatcccaggagatgtgtggctctttggaatagacatcgaaaatattgaatgttatctaaaatttcaaattaagggcggcaatatcatattttggatttcaactcatccagctgaatacccgttggaatatccttttaaataatagactattttcactttacgttcttggaggtactcattatggccaaaaaaactttttacaatgaagaattaaataccactgaggaatattcggaggtgtggaaatacgaactcatgcgagtcaaagacatatctgacttgatagtccataatcattactggaaagattctcgaggagaactttggttggattttgatgaccccaatgagaattttagaaaggcctttaatgcttatagaaatcgaaaaggattcatgcaaccaaatgaaataaaaaagttacgagaaaatttgcacttaagtcagcgcgtcttttctgaacgattaggtattagctatgcaaaagtatcacagatagagaacaataaacgagttcaaacactttcacaagaagtctcttttagaaaagcacaacaagattacgaaaaacagggatttttgacttcttatgactcagttgcaagtgatagtgccgaattaactaaggttctaactgaaacagaatatgtagatacggccaaatatttctataaaactaatgattcttcagaaaccacaatctttaaagttcaagaatttgttggaggtgttgcataatggcagttttagaatttaaaagctatacagttaacgagctgagttataaaagaaacgatttatataaagaaactagtcagaatgttagtataaatcccaaaattgaaattaaaaatacgctaagacaagacaaaattattgtaacagttgatgtgcatattggatcaccggcggagaagaaaaatccatttatagttacggcgagcgtcagtggcgaatttgtctatcatgagaaagaagatcataatcaagttggtattgatactttaatcaagaaaaatgctgttgccattctctacccttatgttcggtcgctagtatccggtataactaatgcatcaaaccaatttccggcacttattttgccgactataaacgtggcacaattacttgatgaacaaagtaatcgtcaagaagctgctgactaaggtttataatacaaataaatcgtatcatatgataaatatgcagaaagtgtatctaactataggatagatatggttagttgcagtattcataatcaaaatatttagacaggaaaacatctttgccactattagtaatttagtgacaaagatgttttctcttatatattcctaaaggttaaaagattatgacaattttgaaaagagcgattatcaatcctttaaagtaggcccaggtaatgtaggaaataccactcctcagctaatgactaatattaaaatgtttatcaataaccggtaaaaaattattgattgaattcggattgcattcaagacgagaatcgaaaaaggatccaattcgtagatgaattgaatcctaaatataacttcatcgtctctgatcaacagagtttcctttgtttcaaatcaagcccttttagcttataatcgaccgttctttgatgccagtcatttgaatcaagtaggctgatccgattagtgatgcatcttaaattccaaataacggtcattatacaagccgactttggctggtgataagtcttgatagatttgaagatgcttgattgtgttattgtctgggtaaaattggcgatcgttgcgaatggccttaggtaatagcgccttggctttccgattaggtgttgcgtaaccgatatattccgcattttgggcggcgttcttgggttcactcataaagttcaagaaggcgtaaatcgccttaaagtgtttggccgttttaggaatgaccaagttatcaaaccacaagttactcccttcggatgggacaacgtaatgcaagtgtgaattgccagccaacatttcactagcctcaccggaccaatcgaccgcgattgcggcttcgttttggatcatgtacattttaatttcatccgctacgacggccttgacgtttggtgatagccggttaagcttgtttcgcgcagccagtagagtggctggatcggtcgtgttcatggactgattcattgatgcgagggcgaaccccattacgtcgcgggcgctatcaatcagcatgattttgttatggtattttcgttgccacaaatcattccagtgttgaatactgcccggctgaacgtacttgtcgttataaatgataccaagcgttccccagaaatatgggactgagtaacgattgtgttgatcaaaggccaagttcatgaagcgcggatcgtaattcttcattccagtcagtttacttttatcgagcggtaagagtaagtgcgcttttttcattttttcaatcatgtaatcactaggtacggtcagatcgtaactggtgccgccttgcttgattttcgtatacatagcttcgttgctatcgaaagtttcgacgttaacgtgatagccagtctgcttttgaaacttagtgagcaggctggggtcgatgtagtcaccccaagtatataggttcaaaacctttttgccagtactaccagagctcgtctgcaagcgttgcgcgccaaaggccagtaagccacagacgactagtaagctaacgatgatgcttaataattttttcactttcgccgccccctaactgctggccgccggtgccgactactgtattggttaatgaagtagtagccaatcactaacaccagtgccatcaggaacattagaccggacagggcgttgatttccaggttgatgccttgacgggcccgtgagtagatttcaaccgacagcgtgctaaagccgtttccagtcacgaagaaagtgacggcgaagtcatcgagtgagtaggtcagggccatgaagaagccagaaaagatcccgggcatgatgtagggcacgatgacttggctgagtaattgccaattgttggcacctaagtcagccgcggcatccagtaaactggtgctcatttcttgaatttttggtagcaccatcaagaccacgattggaattgaaaaagcaatatggcttaacaagactgagccaaaaccgagcggaattttaagggcagtaaagaaaatcaagaaactggccccgatgatgacgtcgggtgaaaccatcaagatattgttcaacgataacaaagtgttgcgggtaatcggtttggtcgtactattgattccgagtgcccccagcgtgccaatgacagttgctaataatgatgataagagcgcaatcaaaatggtgtcgagaaaaatggcaattaaacggctatccgcgaataagtcttggtaatgttgccaggtaaaaccatgaaagttgttcatagtcgtaccttggctgaaggagtaaacgactagaaaaataattggcgcatacagcacgatgaaaacaagccacaggtataagttgcgccacttgaagttacgtaaggtcattatttcgtcaacccctttcgtgcgcgctttttactgctgccagtgagccacatgatgatgaccatcgcaataatcaggacgaccccgatcgtcgaacccatgccccagttcattgtcgtcaagaagtgttcctcaatcgcagtcccgagtgtaatcaccttattgccgccaattaaacgggtcaacatgaagagtgacagtgagggaatgaagacggcttgaatgccagccttcacaccggggagggtcagcgggaaaattacccgattgaaggtctgccaatttgtggcaccgagatcccgactagcattgacgtaagatgggttcagttcgctaatcgagttgtaaatgggcaggaccatgaacggaatctgaatataggccgcgacaaagatgaagctgaaattagtaaagagcaattgcttgggcccgattccgatgaaacttaaaaactggttggcgatgccagcttgactaaaaatgccgatgaaagcgtacgccttaagtaataagttgatccatgttggcataatgattaagagcagccacagctgcggatgcttcgtttcgttgagtaaataagccgtcggataactgatcaataatgttgcgagtgtgatcaagaaggcgtaccagacagagttgagcgtcatcattaagtaggtatttgatgaaaaatacgtttggtagttgcccagtgtaaattgcccgttaatgttgaagaatgattgatagatcaacaataggactggggcaatgacgaagaggatgatccacaacatgtacgggataaagtaagcggtgttacgacttaatcgttgttttggttgcatgttgacacctcctaatcatcttcgtattgttcaagacgagcatcaaaagcagcttcgctctcgtttaaccgcatgacgtgaatgtcttgtgggtcaaaggtcaggccgatcggttcgccttctgcggcagggttagttgaatgaacgagccattcgttatgatcggtatcgtaagcgacgatttcgaaataattgcctcgaaatagttgggagtcgacagtgacgactaatttgccttgatctgcggccacaatgtcgagatcttcaggccgaagaacgacttcgacagcttcattaggctgcattcccgcatcggcgcattcgaattgtttgccgacaaattctacttcaaaatctttgagcattttacccggaataatgttactttcaccgatgaagttcgccacgaaatggttgatcggttcatcgtaaatatcaactggggacccaccttgcaaaatctcgccagcgttcatgacaaagatttcatcactcatggccaaggcttcttcctgatcgtgggtgacaaagagaaaagtgatgcccaggcgttgttgaaggtcccgcaactcatactgcatatccttacgcagtttggcatcgagagccgataacggttcgtcgagtaagaggactttaggctgcataacgagtgcccgggcaatggcaactcgttgttgttgtccaccagagatctcactgatttcacgttccccaagatcggctagttggaccattgcgagtgctttttggacccgcgtctcgatttcatccttgggaactttgtgtaatttcaagccaaatgccacgttttccgcgacattcatgtgtggaaaaagggcgtaatcctgaaagacagtgttgacttgccgctgattggccggcagggtgttgatgacctgaccgtcaaagtaaacttgaccggaagtggcatccgtaaaccccgcaatggtacgcagaatggttgttttaccacacccagacggaccgagtaacgtatagaatttgcccgcttcaagatctaagttgatgttttttaaaacttgatgttccccgtaacttttagtgacatttgtcaatcgaatgattggttgtgtattaaccgccaaagtaaagacctccttaaaacgtgtaccaagctagtgtaacctaataccagctcgattggttgtgacatgattataagtaggacgcggtcgtaaccaaggtgaacgtgcaggacgtggtgccaagattacgaatctgatgcgtcttagtcgcatggaagtacagcgtatctcccgccgtggcagtatattgctgagttccgagctgtaagcttaaagtgccggtttgaaccataataaaggtctctgccggcgacggctcaaaagatttgaagcgaccactaggtgccagtgtgacggtgaccggttctaactgattttcgttagacgcgggtacgagccatttcacacggtatcctaaggcttcatcgtcatacgtggtctgatctgctggatggtagaccactttgtgagtgggctgctcagccgcaaaaaaatcagcgggggcacaaccgagtacttcaagaatcgcgaagaacgtctccattgaaggcgatgactgattgtgctctaactgtgatatgtaccccttgctaaggtcagttcgttcgcctaattcttcttgcgtgagttgcttttgaatccgtaagttgcggatgcgttgaccaatgtccatgacattcacctcgaatcggtagttttgttaaactaaacaataagtttagtacgagctttaattataatgaaaaatgacgtggtgacaagcattttttacaattggcagcttctttttttaagtctgccagcttgtctggtcaaatcgcccagaaacagtggtgttgaggggttggaactgtcgtttggttagtgaataaattaggtgcgttgtggacggactttttgtggcgtgccgctgaagcctgcgcttgctacgccaacgaatcaatgcaaaaatcgcattaatccgctggctaggcaatgctcagcttcaacccgcggcccctcacactctaataaaaaagcccaagacatccgtcttaggccgttagcgttgttgattaatccgcgcggtaaacgacttcaaaaacttcactgaccatcggtgtgtccgatgagaggtttttgccgtgttcttctaacgtcggggtgaattctgccgtcttacgcttgcgccaatcaccaattgtgcgatcaccatcgccttcatggtaagcgtgttctgccgagatgcgataaaacggaatgagttcagacaccaccgttttcagaatcgcgaccggtttcatgtcaccatttagcaagacgttgtagtcgccaacttgtggaatggcaatttgttccgcggtataactgtccagcggcgtggttgtcgctgtcttcgtcccagccagaattgcgtcggctaaagcagtcacttcggcagggttattttgttgaccgaaccaacgtgtttgataagaagccccgtttgtgtcggtgctttcgttataagcatgccataattgttctgctgattgagcgggcataaaggtcacctaatttcgattagaattattgaattcgaatgcatgtaaccgaattcacaattcaagtatagcatgacatttctgaaaacgacacgttcgacactggtttttcggggaaaattaagttagtcaactattgaccgacatttgctataatatacgtacgaattggagggcgaaaatcaatggaaattacacctgttaaaatgctggatttaccacaaatcatggcgatcgaaaaatctggtttttcagaagcagaggctggcagcgaggctgcttatcgcgaacgcattgagaaattagcggatacttttctggtcgcccgcgatggtgcagtcgtacttggctttatcgtgggaccagctgtcggtgcccgctatattgaagatgagatgtttgtagagacaccgactaacttgccacgtggcggccatcagctggttttcacgttggcagtttcgccactagcacgtcaccaacagatcggtagtcaattattgaccgcgctagctgagaaggctcaagcagacgggcggacaagcatggcgttgacttgtttggaacgactaattccgttttatgaacgtaatggttttattaatcaaggtgtggcgaactccgaacatgctggtgaaacttggtataatttagagaaagtctgggattaaatcatgaaattagcaacattacaagcacaattaccggattttgagatccgattactaactttagctgaccaggaagcattgctaaagctggaacaaagtaatccgcgctatcaccaatatttctcaccggaaccactaacgatgactgaggtacaacatgatttgacggcccacccggacgagctagcggcggcacaaaaacaggtttttggtttttacttagcacaccgtttagtagccgttttagatgtactcaatcagtatccacaagaacaatttttattcgttggattactcatggtcaataaggcttaccaacgtaaatcagtgggccgagttattgtaaccggactgatgcaagcggcacttcaagcgaatataacggcgatccaactaacgcgcgttactgctgatgaaggggtcgcaagattctggcagaaactcggttttgaagatggtaaccagctgttcttacctttaaaagccggtggtcggttagcggtgacgacgatgacacggctactccaatagaattctcatggaactcttagcaataaggcctagtaagcgatatcagacatgttaaactcgtgatgactaataaatagaaatgaggttaacacgatgattaagcattggggaaaggccgaaactggcatgttgattgcagccgtattgttattaatggtaatttttaccttttttgaaattacggctagtttaacagttagtgtcattgcttttccgattagtttgattgtgttgatggcgattatggaattcgccgcaacggaattacggcgcaagtaagtgactcgcagatagatcgtaacctaatatcgtgcttgtttagcaggagcacgtatatatagaagcccgtatttaccacgattggcagatacgggcttttttcgtgacggctgaggactattcctactaggtctaaaggacactgtttggactgtacaagtggcctgattttaacgttttcttagcttgtttataactgtactatactgtaccatttaacgtaagcgaagtaacgactgtgtattaaatggaggtgggccatgcaaattgatcatggaagccgacaaccgtattacgctcagatagtaaccggtattgaacaagatattgctcatggtgtgttacaaagtggtgaacaactgccgtcggtgcgtgaaatggctcgtcaacacttgctgaatccgaatacggtcagtaaagcctataagcgactggagacacagcaaattatcgagacggttccgggaaaaggcacgtacgttaaagtggtggattcaacgctgttccgacaagaattacgggaacagtttacacaaattgtcaggctagcgggtcaaagaggcgtcagtattgctgaattgcatggctggcttgatcaaatgggggaaaaataatgagtttagtgattaatcagttaagtaagcgcattgaccatcaccagacgttagatggcattagttttgagattggacttggtcaaatcgtcggtgttgttggccgtaacggggttgggaaaacaaccctttttcggacaatcaatgggcagtacctcacggatcatggtcaggtcctggttgatgggcaagaggttgttgatcaaccggaaatgcggacgcaactgtgttttattgatccactggcaaatttttttaaaggcgcgacgattgcgcaaatccagtggtattatcaagctgcttacccggactttgataatgccaaatttgcgcaattgttagaccgttatcatctgacgtccaaacaaaaattacgccatttctctaagggaatgtttggtttgtttacaatcattctcagtgttgcgacgcaagcgccgtatctctttttggatgagccgctagatggtttggatgtcctaattcgaaaaaacattcttggtattctaattgatgaagtggctacgggaaaccgttcaatcgtgattgcgtcacataatttggctgaattagagggggttattgaccgcgcgttgatgcttaaacacggtcgcattgtcaatgactatcaattagaagccatgcgacgaagtgcacgaaaagttcaattagtgtatcgtgacaagcagattccagccgttgttaaacaattaggccatattgtacacgtttctggtcgggttatcgtggtagtgtttgaagattataatgctgaggtccaggcgcaattagcgacaactaacccggtatttcaagaagatttaccactctcattagcagacttgtttatggctaatctgacggatgaagctgactttgaattattatcttagggggacgataaaatgacgaaacgaaagttatggcagttgttatggcgccactatcgcacgttgttattaacggcgggcggtgtcttactactagtaggcataaaggaaggctacagtattgcccataatccgtcacggtatgttgcacaaaatgtcagtagttttgcgttgatggaagccactcatcttcggatggaaacggtggtcgccatcatcgttagtctggtgctaggagtcgcactattcttaagcgataatttcacgaattttaatcaatatttatttagtttgccggtcgctcgaaagcaaatttatcggcgtaagatcgggttacttattgggatgttggtcagcgcatacatgttggcggaagctgtttttggactgattgcttggcgcgtgttggctaaacagcaggtgcggattgattggcttacgacattgtatgaagaacttggaatcctggcagtaatgttagtgtttggattattagccgctacgttcgggttatgggttggccatatctttgcgagtgcgcttgcgacatttgtcttcgtttgtagcttgccctttgcatatgatggcttgatcaatcttgctgcaggattaacgaagcttaaatatgagcaggtggatgttttaggtcagctgccgagctggaaacccgggggcttactaaccacttgggtgatttgtggtgttatcggtggcggcctgtatttgcttaaccgctgggcgtttgagcatttatctttggaaaatagtggggattttttccgctttccgcagtggcgcggagccgtcctgggcttttcaattatttatctaattgttgcaatttgctgttcacaatttggtaacggtgttttagggttgctaacggataactatcatgcgcatatgccattatcgactgggattataatggcgctggtcgttgcctatctaacttggagtttggggcggtggtttctgtaccgaccggatcgttttcgcgatgcgtggacggttaagaagttggcttaacttggtcataaatctaaaatgcgcccgttgaagttaagcagactgacttcagcaggcgcatttgttagcggcaattttaaatttattatcctgattgatgaaactttagcgaatcttagttaagcgttttgcaacggtcttaatatttagtagatcccaatcttccaagttgtgtgaaatcgagttatgcccccatgttccacaaccgagtgttaaggatggtgcgacgttatcatatttataaccaatggcaccttgtgaagacggcacgttgatcaatgctcgacaagcagtcatttctaaggcaaacttgttcataacagcttcgtcagtcgtatgcaaggcggccgtatgtcccagtccgccaagtgctaggctgcgtttcatcaggttgaagccggcctcagtatccttggcatgaacgacggcgagaactggtgataacttttctcgtgataagacttggtcaccaccgatgctaggcaactcaactgctaatactttggtatcggatgggacatcaaagccagcccactgagcgatttgccatggcgtttgcccagctactttcgggtcaacagcctgtttatccaggttcatgacagttgcttctaaggccttgaagttctcggtaccgacaaagtacacaccgttgtgacttaattcacgtttaacttgatcatagatttgatcagcaacgattaagtttgattcggaagcacagatcatgccgttgtcgaatgacttggaagtgacgacatcactgactgcctgttgaatgtctgcggtttgctcgatgaagcatggcacgttaccagggccaacaccgagtgccggtttaccagttgaatacgcggtcttgaccatgccggcaccgccagttgcaataatggtagcgacgcccggatggttcatcaaggtgttggttgcttcaaggctaggcgtcttgatccactgaatccaatccttaggagcgccagcggcaatagcagcatcgcggatgattcggccagtttcaacacaagatttttgtgcaaagggatggaaaccaaaaataatgggattgcgagtctttaatgctaacatggcattgaaaatgacggttgatgttgggttggtaactggggtgacccccgcaataattccaactggttcagcaactttcatcacgccactgactggatcgtcattaatgataccgaccgtcttgtcatccttgatgtagttataaacgtttttggctgcaaagtcgttcttcgcaactttatcacgataatttccgcgacccgtttcttcgacggccatagcggccagcatgccacgagcagcgtgggcagcgcgggccatggcagcgacagcctgatcaacttgactttggtccatgacttcaagacggttggcagctaacgaagcatttaagactaaccgatcgattgaacgtgatacggttgtttcttccatttctttcagcattcacggttcctcctatgcaaaatcaacttgtttcttatttcacaatcactattataaatactttttcacaaatgtaaatagctaatatttaatttcgtaaattgcttttgaaacactataattattgatttaatagcgtatataaatgtaaataaactgttcgcttacattttcaccgaacggattgctgttataatattcacaattaattattgattaaattcgaagcaacttttggcttgatctgtaactgattttatataaatggaagggtttacaaacgggcggttgtcaaataagcaagaattgacggggaatcgttggttaataaatatgacaaatcggttatcactcctatgtaaaatgtgctaaaatgaatgtgattcaaaaatcgtatctcttaattaacctaggagggttattttatgtcatttgtaaatgctgttgatatgacacaagacgcatacaagaaccattatgctattggtgcgttcaacacaaacaaccttgaatggactcgttgcatcttgaagggtgctcaagacactaacaccccagttattatccaagtttcaatgggtgctgctaagtacatgggcggctacaagctcgttatggacttagttgctgatgaaatggaaagcatgaacatcactgttcctgttgttatgcacttagaccacggtaactacgaagctgccaaggaatgtatcgaagttggttactcatcagttatgtttgatggccatgacctaccatttgccgaaaacttagaaaagactaaggaaatcgtcaaattagctcatgctaagggcatctctgttgaagccgaagttggttcaattggtggtgaagaagacggtatcatcggtgaaggtgaattagctgatgttgaagaagctaagactttagctgctactggtatcgacatcttagccgctgggattggtaacatccacggcaagtacccagaaaactggactggcttacacttcgatcgtcttcaagaaatctcagaagccgttaagatgccattggtacttcacggtggttctggtattcctaaggaccaaatcgttaaggctgttgaattgggtattagcaaggttaacgttaacaccgaaaaccaagttgcttttgccaatgcaactcgtgcttacatcgaatctggcgcagaccaaatcggtaagggctacgaccctcgtaagttattggcacctggtaagaaggccatcgttgatgttgttacatcacggattggctggttcaagactccagctgttaaataattggatttttgattcagaaaaagtcgactcttcggggtcggcttttttcctgcgcttttttggggaacttggtactgacttaccacctgggagtgccagtgtcagtgtacccttttctggttgctattatcggggaaccaattgtagcgtgatttttaattttgcggtttgttaaaataatcgtaacttaatgggatgctgttggtatccaattgaatgaaggaaaaagtgaggtcagtgattctcgaatgccgagggtcactgacctcattttggtgttaagaacggataactaaacattaatcgcgtcttgcaattgctgctcattgtaaaaaattaatacgataaacatcaccacgtaaagtaataatggtaaccacgcatagttcagggtaatcatatgctgagtggcgatattttgcgcatgattggccgtgtagccgcttagatgaaagagtccggcggtgactaggccaccaagtcctaagccgacattgacgccgaagtcatcagtagaggctaaaataccttctgcttgaatgccaagcgccgtgccataacggatcgtatcagcaatcatgattgagaccaaaccaatgatgagaccgttaccgacagcattgatcaacgtaccaccgaagacgaaggccagttgattgatggctgtcccgagaccgaggatcagttgccccacagcggcgattgcgatacccgccaacatggtattctttttcccgtggtggttggctagccggacaattaagatgaccccgatcagtgacgcaaacgtaaagccgttaacgactggcactaagtcctcacgctgaatcaagtatttaaagtagtagatggtcgtttgattcttgatggcagttgttaaccaatacagtaaaatcacgctggataaaataaaccacggctggttttgcttgagcatgccccacaccgcactgagtgattggtgcggacgctcaggttgactaaagcgttccttgacttggaagaaggtgttgaggatcaggaccaacgaaataatgccaaatagaacgattgtcagtaaaaaacctcgttgctgatcaccctgaccaaataaagcaactagtggcaaggtgaagacagcgacgataatttgaacgctactaccgaagaattgacgaatcacgcctagtaaggttaattcacgttcattctgggagagtgctggtaaaatcgatgtgattggtaggttgacggcggtatagaagaatcctaaccctaaataggtcacataagcccagacgagtttaccagttgctccgaaattcggggtcacaaaggtcaaaacggcgaacaagacgtagggtaacgcgtaccataagaaaaacgggcggcttttaccgaagcgcgaatgggtatggtcaatcatgacgccgataatcagactttcaacgacatcggctaagcgcgcaacgacaaataaaatcgccgctgcactcgtggataggccgtaaacatcggtatagaagaataataagtatgtggtcatcatctgaaagactaagttatccgcggcatcactgagcccataactaattcgttccggccaagctgtttgccaaggttgtttcaatattaacacctctaagtatggttttgcacaatctaattctaacctagttgcacgcttaaacctaacggaaaggtttacaaaattgattaggtcttagattgatcagaaaaaagcctgcaggtggcgttcgtcaacctgcaggctgtgcattgtttgtcctgattaaaagctacttagttgttaatttgctgaccttggtgagtgctgggattaagcccaagctatctaacgtttggtttggtaaaacaacggtgttggcattgccgtccgctaaggctttgacagcttccgtgttttggaagataaagtagttttcggatgattgtgacaaggcttcgtttaagatccgcgtccggtaagcatcagcatctgcttcagtttgaacggctgttgctttcgcctttgcactattcactaaagcttcgttttgggctttgttggtggctaataaggcccggttattggcttcattttccagtgtgattgacttactcttaccttcagcagttgcgatggtggcatcccgttcccgcgtagcttgcaggagtttattcatggaagcctgaatatctgccgaagggttaacggaatcaatattgacccggtcaacatttaaaccgtagcccgccgtaacggaggagatctccttgaagagggcggcattgatttcttgcgtcccattcaggacttcgtttaattctttgttcccaatgataccacgcagtgccgcgcgggtatcttgaatcatactacgaacggagtcttcgtttttaaaaacgaagtcttcaatattagtgacgtggtacttaagcgaaatcttaactgagatttcagcgttatctttggtgataacgacttgttgattaagatcaacgggtgtctgagccgtgttaacggtgatgacacgtgagatgaacggtttaataaagtgaaagccggaactaatgacgcgctcgaactttccaaatgttaagacgacaccttggttcggttgggtgatgatgcggatggaagcgattaggactaaaacgaccagtagaatgacaataattgcaacgatgatacctaccataataatttccccctattgttgtggtgcgataatcgttaccgttagaccatgagcactgacggccgtgatttcaacggtatcgccgatgtgcagtggtgttgcggcgtgcaaatggtacaagatgccatagaatgcgacgccgtcagttagatcggtcggtttgataatgaaacgctgaccgattaagcgctgatctaagtatccctcttgcatagatgacccacctttaatgtgataataattaaattatatgctgtttttggttagattgatagggccgttataaaatagtgggtgagttttggattgttgataaagtatggcgataaatggtgaattcatgctgcatatcgcccagtagctattgaataagctcgttttagagggcggttcagtaatacgggattggcgagttaaaggggtgcttgaagtatttaagccgacaaaaaaaccttcgtacgggaatacgaaggtcaaaaggagtaggtcagcatatgacggggaatcatatgctgataacttgatgagcgtttattcatataagcggggggacgttcacatgccgctcatcaagctgtcaaagttgttacgctttgacggatttcattactttggaggagtaaatgaaaagaatgttaattattatagtagcaatcttggagggggatccttaattgctatagatacatattaacaacgaattgtgaagaaaatgtgacgatgatttttcaaatttaagaattattgattagattacgaaaagatttatgactattgataaatttatcggcaattaaaattgcgtaagaattatctgtcagcgctttcgcaatggtggctttttaaattagagcgtgtatcattaataatgatcacggaaattaaagacaggagatgcttgcatgtacgaacaagcttgtaccacaattttagttgggaagaaggcgaccgttgatggttcaacgatgattgcccgcaatgatgatacgtttatgccgattacaccgcaaaaatttatcgtccatcccgccgttcatggtcgcaacgaaacgttaacttctgggaagaatggctttaccgcaccacttccagcggatggctaccgttaccaagctgtaccaaacattgaagtcgctgaaaagggtgtttttgaagaaaatggctttaacgaaaaaaacgttggtgtttcttcaactgaaagtgtttatggtaatgaacatacgctgacttttgacccattcgtgtctaatggtctcgcagaagattcattgccaaccatgctcacgccgttcattgattctgctcgtggtggggttgaatacttgggccagttgatcgctaaatatggttcgccagaaggtaacggtgttttgttcaatgataaagatgatgtgtggtacatggagatcgtcactggtcaccactgggttgcacaacggattccggatgatgcttacgcggtggctgccaaccaagttgcgattcaatgggttgattttgatgatcccgataactttatgtggtctgatggtattcaagaatttgttgcggaacaccatttgaaccctgacaaggaaggttttaacttccgtcatatcttcggtactgataatgaaaaagaccggcattataatactccccgggtctggtacggccaacgttatttcaatccagagatcgaacaagatccacagtcgagtgagctaccgttcatttgtcacgcagccaagaagatttcagttgccgacgttgaatttgtactgggttctcattataacgaaacgaagtacgatcccttcttgaatacaccagaagctaaaaagtttcggccaatttcaatgaatcggacgcagaattcacacgttatgcaagtgcggaatgacgtaccagcagaacaaagcgcgattatgtggatgacatttggggtaccagcttttgcgccatacctcccattccatgcgaacgtttctgaaactgatcctagttttgcgaacacaccactaaaacatgatatgaatagtgcttactggctctaccggacactatcaatgattgttgaatcacactatgctgatttcgttcaggatgatattgattatttgaaagaatgtcgaatcgaactgggtcaatttgtggctgcgaccgatgaacaagcggcgaagttatctggtgacgagttaacggctttcttgactgaacaagataaagtaatggtcgcaaagatgcgtgataaagcccaagctttgattggtcaattagtcaccaaaggtttaacgctctcgaaactaacctataatgttgatatcaatctttaaactttcgttatgacggtatcagcgtgtataattaggttattaagaggacaaggagctgatggcaaatggatgaaaatgtcttatttaatcctggtgacgcaatttcagaatcgcatgactacaatgaagcgctccgtagtgcggatatttataatgcgcgtcacggacgtaagcgcggactcatgattgcgcggccgctagaacaggatcacggttattcggttttttacgcggatgacttactgacagccgatacgccaagaccagaagcacgtcaatatcacgttgaaaagcgtattccaaaagaatagttcaatcatcccatgatcagtaaaaagggtcatgggattttttattttctaaacagtaacccatgatgttgatattgggttactgttgttttataatagcgtttaaattgattaacaggggtgcgatgatgacgaatcgacagacgattaaacacctgacccagacggcgatggtgaccgctttgattattgtattaggtttctttccgggaattccagtgggctttattcccgtcccgattgtgttgcagaatatgggcatctttttagccgccgagttacttggccgcaaatatgggacgatcgcagttggattgttcttaggattagtggcactgggactacccctattatctggggggcgtgggggtgccgcgatttttctcgggccaacgggtggctatctcgttgcttggttgctggcaccaatgctgattggaacgttgatcaaaataactcgggcgatgacaagtggttattggtggctagaagttggcattgtctggttggctggtatcttatttgttgatgtaatcggtgctagttggctagctgttcagtctcatatgactttgacggccgccttgctgtcgaacgtggcctttcttcctggtgacatcattaaagggactttggccgtatttattgcccggcgtgtgcgggccatcgttgattttggattgccagcttagtaaatagctaatgtgattggcaggtcaggaggtcataatgacaactaaagaacaagtcttaacaattttattgcgtcatcatggtgagtggcaatcgggggaccagcttgcccaatcagttggctgtagtcgtgagagcatttggaaggcaatcaatgctttgagaaagcaaggacaccagattgagagtcgtaaaaaccggggctactgttatctgggaagtcgtaatttggatgccaaagccattcaaatctatgggcaacgtcaatttacggggtcccttgaagtggtcgcccagacgccgtccactcagattctagctaagagctttttaagtcatcatcagccacagtttgccgccttcttcgcggacgaacagacggctggctatggccgtttgggccgggacttctattcaccggccaaaactggactgtattttagcttggttgttcctaatcccacgaatgcattggtcaatgtgggtttactgacaactggtgtcgcggtgagtgtcttgaatgttttacagcaattttatcctaataagaactttgggttgaaatgggtcaatgatatttatcttgatcagtataaggtcgggggcattatcacggaagcaagtttggaattagaatcgacttctgcaacggcctttattgtcggtgtggggctcaatttaacgaccaccgattttccacgggaattgcaagcccgtgcccaagcggtcgacccgagcatgtcagtggatcgcaatcggttagcagcggccttattatcagcactagtagcgctatcaaaacgctacgctacggccgactttttgccagcatatcgggctaaatcattagtgttgggtcaacaagtgacacttcaagtgggcgattccgtggtgaatggggtggctgaagatatcgataaacatggtggcttagtggtccgcatgttgaccggggagcggcggacatttacgagtggtgaagtgatcagggtagggttaccagtatgactgagtgggtaccagtgatttacggcatcggtttagacgctgccggtcggtgccaacattatcaccttgaaactgatatcgcggcattgtggtgtcggcgatgtcaacactattacgcgtgttaccggtgccatgatacgttgtgccagcatacttttgtggccagcgctccgacggatttagccgtgatgtgtggtgcttgtcgttatcgaatgacggttgatcggtatcatgaggggcaatgcccgcactgtcaccggccatttaacccgcggtgtcggttgcatgacaaggtttactttctaatcgatgagagagaagtacagtccaagtgtcagtaaaagtgaggatggtgctagtttattcaatctaatttaatattaataaaagtcttgacataatctaaccaaaaactcataatgtgaaatatcatgagagatgagtatcaatggtgagctggtaacagagagtcgtcaagtgctgaaagatgacccagcaagcgttgagaagatggtctttcctaatgaacgatcggtgagcagtgatgttaagtggtcgcggttaatgcccgttagcgcagcagttagttctgcatgagttggtgtccaaatgggtgctattaaggtggtaccgcggcgaaagtcgtccttgttataagttataacagggacgactttttgtcatgtaaaaaagtgagaaacggggtatggaagatgagaagaaatacaaagtggttgttagctttaggtggcattattgttgttttggtggctatcgtggggttcagccgtgccagtagttcacaagcaagtcagggtaagttgacaacggtcaagattggggttgctccggggccttatggtgatatggcgactaaagttatcggcccattacttgagaaaaaggggtataaagttgttacaaaggaattcaacgactacgttcaaccgaataaggcactgaattctggggaaattgatgctaatttatttcaacatacgttgtatctgaagaccttcgctaaagctaatcacttgaagttatcggccattggcgagacgcccacgctggggatggggatttactcgaagaagatcacggcactatcagatttgaagtccggtgatacagtctcgctaccgaatgatccgtccaacttagctcgagcactacaactcttagcggcgcaaaaactaattactttgaagaaaaatatcaacgtcgcaacggctagtacggcggatattgtgactaatccgcaccagttgaagatcaagaccttggatgcagcccagttaccacagtcgatgagtaacgtgacgattgctttgattcccggtaattattcctggaatgctaagttgaaaccatcgaaagcgctggcacttgaaaagctcaaggaagattacaaagaagtctttgttgtcaagacgagtcaacgcaattctaagttcggcaaagctgtcaaagcggttctcaaaagtgctgcttttaagcaggcgattgcaaagtcggaatttaaggatttcgataaaccagcttcatggcaataggaggtcaagggcatgagtcagattgaattaaaacatattgatgtgacgtttcagcagaagaagcggacggtgcacgctgttaaggatgtctcactaaccatcgagaaaggtgaaatctttggaatcgtggggttgtcgggggcaggtaagtcaactttagtccgaacaatcaattatttgcaggcaccgagtcagggacaagtgatcgtagatggtcatgatttgaccaaagctaatgcgcgtcagattgcgtccgtgcggcgtaaaattggcttcatctttcaaaatttcaacctgatcggtaatcgaacggttgcacagaacctggcgtttgccctgacagcgggcggctatcctgaaaaagcgcagcctgcgcgtattcaagatttgctaacgttagtgggacttgcagatcgtcaagacaattacccggcacagttgtctggcggtcaaaaacaacgcgttggtattgcacgggcgctcgccaatgatccggatgtcttattgtgtgatgaagcgaccagtgcgttagatgttgaaacagccgaagaaatcattcagattctgaaagacatcaaccggcgacttcatattacgatcgtctttattacccatcaattggaagtggccagaagcttgtttgaccgggtcgctgtcatggaggcgggccaattagtggagcaatcgagcacgtatgacctgttcgcagcgccccagtccgatatggggcaacggcttgtcaaccggttcctagatacacaactgccgacaagagtcgctgcacagctcgcacgcgcagatggtcagttattagcattacgttatcgtggtagtgattcactaaccccgattattactgaaatcgccaaggcaacggatattgatattaacattattcagggacggatcgagtttattcaagaacgggccattggggtattagccgtttatttgacgggtaccactcaggccgttaagcaagcgattgcgctatttcagcgacgcgtcgattatgtggaggaggtgcaagtaaatgaatgaaacttggactatattacagcaaaatctcggaacagcattgtgggacacggctaaaatggtctttatctcaggctttatcggaatcgtctttggtaccattattggattaggactgtattactattctaatccgctatttgcctcgcacccgcttatcaacagtgtggccggttttattattaacgcgatccgctcgctgccatttttgattttaatggttgtcttgattccgttcgccaaattagtggctggtgatccctatacaccacttggtggcgcagtatcattgtcggtagccgctattccattctttgcccggctagccgaaggggcctttgccgaaatcgatgcgggcgttgttgaagcagcacgctcaactggtgcgagcttctggctgacttttcaggaagtcctatttcccgaagcattgccggcactcatccgtggcgttgttttgaccttgatcagtttgctaggctattcggccatggtcggaacgattggtgctggtggaattggggacttagcgattcaatacggctataaccgttataataccggtgtattagtcagtgtgattgtcattttaattgtgattgtgcaaattgttcagtggtgcggtgatcgacttgcggatcattacacgcgttcatagtcaggaaaggaagcataaacatgaagtatacggtattaggtgcgggagccatgggattacgttatggtgttttattacaagcagctggctatcaagttgattttgtcgatacttgggatcagcaggtccaaacaattcaacagcagggtggtgtctatgttgctcgtgatggtcaaaaccgccacttggttccgattcgaatcagcactcctgagaattaccatggtcaaccggatgttctgattattttcaccaaacaaatggggttgacagagattttgtcacgatcagcacacttcttcaatgaccagcaatacgtggttaccgctatgaatggtatgggccacattgaaaaaatcaatcaatacttcaagcctgagaaggtgttgggcgggacggccttgattgggacggtcttaaagcaagctggtgatgtcgactttatcggggcggcaaacgctggttcaatgaatattgcaaatcaaacggaacaacctgacgaaatgacccatcaaatcgttgccgaatttactaaagcacacctgaatccgactttgacgacgaactttttaggtaccttattggcaaaggtgatttttaattccgttatcaacacgttgtgcacgatgttccagattcaaatgggcgagtttattcagtcgccagtagctcaaaagttaggccggcaactgattgatgaagcgtttgacgtttgtgaacgggccgggatcacgttactgaatactcgagaagaagagtggcagacgattgaatacgttagtcgagagacgaatccgttgcactttccgtcaatgtatcaagatataacaaaacaccgacccactgaagttgattatatcaatggttatctctatgatttaggggtgcaataccactatgaagctaagacccatgattttttgcggaatcttgttcacttagccgaatttgctgggacgtttgatattacgagcctgaaaccattgacagaagggaagcactaattttgaaatttgaagagtccaaaattttgcagcaattaccaaaacagttttttgcgaatctggtcaaaaaggtcaatgccaaagcggcggccggtgcggatgtgattaatttaggtcaaggcaatcctgaccaaccaacccctgagtttgttgttaaagcaatgcagactgcaactgccaatcccgcggatcacaagtattcgttgtttcgaggtttgccgcgattcaaacaagccgcggctgatttttacgaacgcgagtacggtgtgaaattagacccggagactgagattgcggttttgggtggcagtaagattgggttggtcgagttaccctttgccttactaaatccgggcgatacaatgattttacctgaccccggttacccagactatttatctggtattacgttggcacaggtgaagttggctttactacggttaacagcggacaatcatttcttaccggattatcagcaggttgatccacaagtggctgcggcggccaagctgttgtacctgaattacccgaataatcccactggtgctgttgcaacgtcgcagttttttcaagacacggtggattttgcaaatgaacatcagattggtatcgttcatgactttgcttatggtgcaattgggttcgatggtcagcgaccagtgagcttcctacagacaccgggggctaaagacgttggaattgagatgtacacgttatctaagtcctttaacatggcaggttggcgcgttggttttgccgctggtaatgctgacatgattgaagccttaaatttgattcaggatcatctgtttgtcagcgtctttccggccattcaagatgcagcgattgcagccttgaacagtgaccaacagacggtccacgaactggttagactgtatgaacgacgccgtaatcagttctttacggcagcccgcaagattgggtgggagccctacccatcagggggctcattttacgcttggatgccagtccctgaagggtataccagtgaagcatttgccgatttgctgttggataaagcggcggttgcggtggcgccaggcaacggctttggcgcgggtggcgaaggctatgtgcgcgttggcctcttgattgatgaaccccgcttcacggaagcctgtcagcgaattgcaaaactgcacttattcgatcgttaggatgacctcttagcattaatgatgacagtcagttacttgcttagcataattcatgcaacgggggcgcaactcgttcttgattgcttggaaatattgagctgtaataacggtatcaaaataacgcaactggcatgtgaatgccagttgcgttattttgattcgaggtattgaattattataaattaccggtgctctttaaccgcttctctaacaggtacgcgtccatgtacccaaaggataattcaacgacctgatcgagttcgatcatcgtgccaacatgattaatttgattatcatcatccacgttatagaagatgaagtgcccgttcgttaacgttcccggatagccagtcattgctggcaacatggggttttctgtcgtgatgtgaacgaggttattgaaagttgcggcttgtcgcaaaattgaatcaaaaagatcagttgtggcgtcaaataaccgttcgtcgtttaagacgggttgaacatttaactcatactggcgatttaattcaataaagccacgcatcgtttgtaaatagtcggactgggttgtcaccgattcaattagtgaacggcgacaaagagtgtagcccccaaattggcccgtcatatcgatcagattgagcaggacactatcagcgttcaatgcgttaatgaagccaacaaagaacatgtcagacccgtccgctgaccgaattgcaatcagttggtgctcatttaaggcgttgtttaaagtatgatcaacgtcgtcaaactcgctaactttgatggttgctcgatgcgtatggatggtcttgacaaaggcgctttccaataagagctcattgccgcagaactctaagatctgaatagcagccaatggaatttcctgttgcccgttgtttttaaagttaaatttgtcaaaagttttaaaggtaatcgtttggtcagtgacttgttggacctgaccttctaaataattttcgttgtcttcgaggactagtagcacaacttgatgatcggtttgggcttgggtgactaactgtgttaggactggccgttgatcgtctaaagctacggttggttgtggcacactgttcaaaccttcagtagttgcattttcaaggcgaaaggccatgttatcaaggtcttcactcatcatttcaacttcatcaatgacgtcgtagcgcatgaagacggcgccgtcctggagcccagcatcatcgtaagtattcacgacaacgccatcaggtgccagacggtcgatgtagccggtgtaaaccacttcgctattggcttgatataggttgatgaggtgaacctgttgtgcggctaattgtaaattctcaataattgaactcatcgtgtctaacccccttagttaatgttccctcatcatagcactttttgaggtgaagacgccattataagtcattattcagctggtttggtaagtgtgttatgactaggtaagtaaacggatgctcacgtgctattcaggtcgctcatctcattagaagggccttgttctgcaaatttaaaaccgttttcgcttgcacccggacgctgtcaccggcattgagtgcggctgtttggtatgtgtgcaacacaacacggtgctggtcatcgctacataaaaaatagtgttccgatgatgcgttcacagctagtgatcttaaagtgcaattcgatattcaaatgatgattgccaaaataaacgcatacggtttttttaaaacacaacaaatgtaagggctttctttacttgtgaaataggagtatcggtcaataagtatctattgataataggtaaatatttaataaaaaatgttattttcggtgctattaacgaggtttatcgttataatgtagtctgcggtttatcttgaccgtaaatctgtcatgacctttcaagaggcgcttgatcgtgttgcgacatacatttaaggagtgcactatgtttacgatgtttaagacgattggcgatcagttcgccaatttcaagattattcggcgaatggcgaagtatgatgatcgggccacataccaaagccattaccttgggttagcgtgggaatttctaaacccactgattcaaatcggaatttattacttagtattcggggtcgcgttaaaacgtggcgatccgatgccaggaatcccgtatttaccatggatggttgtcgggattgcaccatggttatacatgaacaaaacgacgctggacgcgtcttctagcatttatcgtcaggttgggttagtttcaaagatgaaattcccagtcaacgtattaccgtcaattaaaatttatggtaacttatatagtttctggacgatgattgcttttggaatcttcctgatgttcgttaatggcatttggccctcagtttcttggattcaatttatctactactttggttgtatgatcgtattaatgtattcacttgggatttttaatgccacggtcagtgttctgattcgtgactggcatatcacgcttcaatccgtattgcggatgctgttctatatgagtggggtgctatttaactttacaacgtctaacttccccgcagtttttgtgcgcctactagaactaaatccgttctactacgtgctcaacggaatgcgggaatcgttgcttaatcgtggttggatctggcaacagcctaatatcacgttgacgattgtcttttggctcttcaatctcgttgtgattctgactggaacgtatctctataacaagttccgttcgaactttgtggatttgatttaggaggcggaactgatggaaaatcaatataaggttgaattgcataatgtcactaaagaatatgatttatatcgtagtaacaacgataagttaaaacacttttttaacattggtaatgttgatgtcccgcggttttggtcgctaaaaggggtcagcttaaacgttaaaccaggtgaagcgttgggtattatcggaatcaacggttctggtaagtcaacgatttcgaatatcatttcgggaatcattcctcaaacgactgggacagtggatgtgcacggtgatacgtccattatttcaatcggagccggcttaaagtggaatttgaccggtgatgaaaacattcggttgaaaggactcatgcaagggttgagtattaaagagatccaagcggttcgtgatgatattgttgatttcgcggatattggtgattttattggtcaaccagttaaggactattcgaccgggatgcggtcacgattgggatttgcgattgcggtgcatatcaatcccgacatcatgattattgatgaagcactatcggttggtgatgacaccttctatcaaaaatgtgtggataagattatggaattcaagaagcaagggaagactattatctttgtcagccataatttacggcaagtagaattgctttgtgaccgggtcgcttggatgcactttggggatcttttagaagtcggcgagaccaaggaaactgttgatcattaccggaaattttctaaggatttcaaagcgcaaacggcggcttatcgtaagaagtatcaggtcggtaagaagaaggaacaagcggactttgacattgtcgcttatgaacgacaattagtcgaagaaaaggctaaggatagcgataagagtaagcaggcagttagccgtcaagttcatcggacgctatacaagcaaatcttgccagaaaagatgacgattgccaccaagctcgtcatgttagtggcaattgtcctgttcgtcttctttgcgttagtgaatgtttcaggtcactcggttacttcggcgattgagaatccgacagtactgttacatccagtcaatcattatattaaaagtcagtcagtcttattcaatagtaagtgacggcggctggttagtggttgcattaaattaacattaatatcgatgggtgattgcgatggcaatcacccattttttgtgtgcattcaagacggctttggttggaataaagtacaatacaacgtcgcacattattcggactgggggccgctgatgcttttattcgaggggacgagcttgggctgaccgtactaccgatttgaaaggaaaatgtctaaacttcaatgcacaatttatgagttggtttcgggttaaattaagcttgattttttgtaatgcttcagcaatctagttatattcgttataagcattagattattttccgcctggaataccatttggtgggttatcttaatactagagcataaagggggtcatatcatggatacgccactattcttaaatgttgtcgcctatgtgctattaatattggtattacaatatatcaaattcaaatttccagacagtacctttatccgtttctttcaaaaatacgggtggtggttaattgggctatgttttgtcgcaatattggtgattttggccgcaccgcaatttcagaacccctttaatgcgttagatgtaccggctattggggtcatgttagtattcgggtacttctttattaaggataaaaaatcgaaacataagtgatgattaaatgagatagcacctcgaacgatgatgtcgtcctgagaggtgctatttttttgcctaaaaatcgatttgagaagcactgatgtttagccgttttaatctagcattaaacgtgaactgggtgattcggtaacggaggggcataattaaaaaatcagtttggaaccttgcaatatatctaaaagatatatatacttaacagcgcgaaggattggtgaatttaatgtatgaattgtttattttaggacagttgatggatcatccgatgacgggctaccagttgcgtaaagcgctggtaaacgtagttggttcagaattaaccattagttttggtgcgttgtacccgttgctagataagttagccgcggctgaagaattaacactggcgtttaagcggaccactaataaacggccacaaaagttagccacgataacagcggctggtcgcacgcaattttggcagttagttatgacgccagtcgcgctcaataagcaaacgcagttaacgtttcaaataaagctgaattttttacatttattaagttgtgatcagcagcaagtaatcttgttggattttcagcaatttgcacggggacaggtcgcacgcttaacggcgcagcacaaacgggtgatgacgaatacccacatgcttgccgctgatattcaagatgcgttgatggtcaatgagttacaacgggtacgagcccaagcacaattagactggcttgaccgccagttgcgcaatggaggggaagttaagggatgaaaacaatgtcgtttgcgactgatccacaaattcaaaagcatcgctggtggatactggttgcggtatgtttatttacgttcatgtcaacgttagatgggagtattgtgaacattgccttgccagtcatgagtaaggatttagcgattccaatgaatcaggcggaatgggtcgtctcaatttatttgattgtgatttgtgcgttattgttattatttggtaaattaggtgatatttacggtaagattcgggtgtttaaaatcgggtccttactattcattattggctcattattgtcaggattcagtgtggggttgccatttctactaattgcacgcagtattcaagcagtcggagcggcaatgacgatgagtacgaacaacgggattattaccgaagttttcccgtttaaggaacggggccgggcgctaggtatgattggctcattcgttgcattggggagtattgctggccccggtatcggtggtttgatcctagctcatttgagctggggctatattttctggatcaacgttccggtgggaatcttggcgatgattttaggtgcaatgattttgccaaaagacgttacgacgacgcaacaaccattggataagaccggggcggggctatttgccgtactcatggttgcactatttgcaggtgtgtttatcgggcaacagattgggttcttgcagccggttatcttagccttgtttgcagtggcaattgtgacgctgattatttttgttcgcgtcgagttgcgccatgaaaatccgctgctagcgctacaattatttaagaatgcccgttttagcattagtgtcttatgtgcgttattaatttttattgcgaactttttctttaacgtgattgccccgttttatttagaaaatgctcgggggctagcggcaaactatgcgggctacgccttgatggtattcccaatcgtacaagtggtggtcgccccgattgctgggacgatttctgacaagatcggaccggaattgttaacgttcgtgggattggtcctgatttcaatcagtcaagtgggttacatggttgtggggctagcaacaccactttggttcttcttattattcgtcggattagttggatttggcaatggtatcttcatggcacctaataattcgatcgtgatgagttcagtgacggtcaaggacttgggcgttgctggcgggattaacgcgttggcacgtgaattaggcatgattgttggaatttcggttgccacgaccgtactatattcggcaatgagtcaatcagcggggtataaggttacgtcatacctgccagctcacccggagatctttattgatggtatgcacattgcgttcatggtctcgttagggatttgtttagttgcgacggtcattactggcgggcggttactaaaacatcgacgcacggcacctgccaagtaaacattagcaaatcaaaaaacgtgttgcgagaaatctgagatgatttcttgcgacacgtttttatattcttgcatccttgatgttgctgaaagggggtctggttaaatcagacttgttttaaagatccagggcataagctcactgaaaaaaactcggattagcgccgttatgacgccaaactcgtcgtttaattccctagttaggctaatcctcagtcttctcccgtctgatttatgcccgcttgtgatactgagcattgatagaaatgtgccatgcgactgctttctcgaacgcactgaaacctgtgcatattacgcccatgattccgattatcggaatcgttgttgcttatctagcagttgcgctaactgaccacgaaattcatcgctatggtgttgaatgttcgtcaagtcgtgactcatttgaacggtgtagtcagcgacttcgccgtgttcgccttgatcgagtccgagttcttcctcttgttcgtcaacgcgcattctgatgactcgtttcaatagtacgataatgacgatgcaaacgatggtagtaaagccaatggtaaagatcgttgctaatagctgtaatccgaataatttaaagccgccaccatagaaaagaccgtttagagaaattgtgttattaacggctttgctagcgaatagcccagtcatgatactgccgaccatgccggaaacaccgtggcatccaaaggcatcgagtgcatcatcgatacctaagcgtggtttgatgaacgtaatgaagccgtaactagttaatgtggcgataaggccaatccaaaaggcaccagaaatggtgacgtagccacaagcaggtgtaatcgcaacgagaccacaaagggtaccggtgcagacaccgactagggttggtttgcccttggttagcatatcaacgaccatccacgtcatcatggaagtggcggtggcaacggtcgtggttaagaaggcttggatggcgatgtcgttcatggcaagcgccgaaccggcattgaaaccgtaccagccgatccataaaatagcggtccccagcaatacccataagatgttatagtgctgggtcatatccttgccatacttgtggcgggcacctaagaatgctgataagactaaagcggtgataccggcattgatgtggacgacggtaccaccagcgaaatcgatgacgccaagtttagctaataaaccgttatcccaaaccatatgaaccattggatagtagatgaggagtgaccagaagatgatgaaggttaataagaatttaaaacggatacggccgaccactgcgccaacaaatagtgctggcgtgataatggcaaacatcatttgaaagatgagatataaaccgttgggaatctttgtcgcggtaagcgcggtcaagtccacaccatgcaaccaagtggctttgagattaccgacaaagccacctaaatcaccggaaaaagatagtgaataaccgaatgcgagccataacaagattgctaagccacaaatcatgaagacggataacatggtgttaacgacattccgtttggaaactaagccaccgtagaaaaatgctaatccgggcgtcatgaataataccaatatactagataacactaaaaacgttgaatttgcagcgttcatactcccaacccctatccataccatttgatgttagaaattataacattgattattgagtgacgcactctttttttgtgtttaggttaaatattaaacttacaaacgggctttggtgtcattatggaactgctgatgtcaggttttgtgacgcaaaactattgaaaacatgagtggactccttgtaaattcttagcaaaatccggtcaaggttgcttgttggcagaaatgtaggaagtgacttccaagagtggtcgcgattagttcggtaatgaaaataattaggcaatggggggcaagtgattaattatcttaaactaattaggggaattggtaactatagtgcgtgctattgcttaagaaaatgatgatatgaaaggtgaggcgctttcagcaattgaccattactaactagagcagtaaggttatcaccacataaattaaaagacgatgagattattacataacgtcttaataattaaaacgggggttcagcttatgcgaaaatatgcgattattggggtcggccacgttggggcgaccattgcttatacattagtttgtaaaggaattgcggatgaattagtcttgattgatactaatgcggctaaagctcgcgcagagcaattagatttacaagacgctcaagcccgtttagatagtcgaacgattattaaaatcaatgactatcatgaattagacgacacggatattttatttgttactagtggcaacattcacgcgttagaccatgcttccggtaaccgatgggctgaatttgaatatacgaagcaaatcgttcaagatatcgctccgaaagttaaagcaaccaaatttaatggcgtggtcatcgatacaatgaatccgtgcgacgcaattactcactatttccaacgcgcaacgggattatcacgccaacaggtctttgggactgggactttcttggatacggcgcgcatgcaaaaggttgtcgcagaagccttcgactgtgatccaaaaaacattagcgggtatgtttacggtgaacacggcgaatcacaattcagcgcgtggtcaacggttcaggttaacggtattccaattacatccttagttgataagtatgatttggacttagatgcatttgaggcagctgcacgccatggtggctgggcggttcattctggtaaggggtataccagttttgccattgctacttgcgcggttaaattaagtgaagcggtctttgcaaatgctcgcttagcatgcccggtctctgcgtatagtgagacctttgggacgtatgttggtcagccagcaatcattggcaaagatggggtcgagagtgtgacgacgcttgctctgactgctgatgaacaagctaagttccgtaattcagcggacacaattatcgagaaattccacgcctttgatgacgtcttaagcgatcaatcagtaaaaaaacgtcaacaagcctaaaaagtgacggttgttaattgtcttgtttggcaaacttctaccaaaatgttaaaattttactaagcagaacgttgactgcattaactatatggtgggatgaatatgcgccgacaattaacaaaccggcaacggtggttcgtgattgtaatcgcgacgattctgggagtaggctgtgccttgcttggtcaatggggccagttcttcggagtcatcgcagcaacgtttgcgctaatgttgttaaccagtggctgtttgactttttgtcatcgccgcgggtggcaacctggaagcggcatgttgctagcattagtcacggctacagggtatgtactagttattttaggaagctatggttatttactgcacagctaagcgcagcactttgatacgaggaatcgaccgtatcaaagtgctttttgtctgcaatcatttttagcgtgctaattaagttatgtttcaacaatgattacggccatcggtgctcatacaaaaggtcgcgactcatcatcgcggccttcctgggtgcggtattgattgtaaacatcaaagtggggtcaccgcacccaaggtattaatggcagacctagttggatagctttacctaaagcctgccaacaggtaagcggtaacgcagacgcaccgccgcgctatcggctgcactaataccgttatagcgattatcagctaacatgacactgtggcgatcacggctgtgttccaaaccaatagtatgtcctaactcgtgttcagccacgtggacttgatccgtataagaatagtggtagcgtacaaaattacgtgttaacaagtacacttgcgcttttgtgtaataaccattggtataaccggtcgaaaaagtaataccagctaagcgataatactgcccactggtggcattactggtccccaaagtaatttgatgatgagcagtggttcccggcacgaatttaaagtgaccagtcgcattccaggcttggatggccgcttgatagacgtgccgctcgtatgatgatgcttgaatgacgtaggtcacttgagcgtgtggccaacgactccgtgaatatggtgtcgcaatcgattttgcgttggcaattggtgtcagcccaagaccaaaaatcacggttaatgtggttaaacctaacttagcactgtacttattcttcattgttgtaaccctctttcccccaaaaacgaaggtcgccatcaataattgtattttaaaacgttgttgagataggagccccatcctagactcaaatttgacctagaatcgcatggtttgatcgcgattaaagttagttaaataggttatcgcgtgctatgatgagaatatcttatgatgatggaaggaaattgatatgacgattaaacaggcaattgttcaacaagccttgacgttaataaaaccgcaaatggttgttggttttgggggtggctcgacggttggtgaactggtcaaggaggcagccaatcatgtgaatgatattacggtcgtcaccccatcaccgacgacccgccaacttgcgaccgttctcgggtataccgttgtagatactgcatattgtgaccgcatcgatattgcttttgacggctgcgatcagttagatcatcacggtaacgcgctcaaaagtggcggtggaatccatgctaatgagaagattattgccagcttggcggatgaatattggctgttaacgatgcaggaccggttagtcgatcaatttgatatcaagacgccattagtcttagaagtactaccagcggccttatcgttagtcatgcggacggtgagtgatcttggcggtcaggcaaccattcgaactgctaataatcgggatggcttcacgttaaccgatagcggcaatttattgatcgattgtcattttccaacgtatgccaaacttacggacctgaatgttgaattggcaactttggctggcgttgttgaaacgagctattttgatcatttggtgacgaatgcttggttgggcgatgcaaccacgaatacagtcaacgcgctattttaagtgttatcagggacgacagcatgaccctaatgattagcaattgagcactgaaattcgtttgacacttttttaaaataattctaaactgaaggtgacgtataaaagcgccaccattttttgaatctaagttattttaaatatctaaggggatgtcaacatggcaaaaaaagtctatactgattatttttttgatgaacctgcttacaacacacatgacggtggctatattccactagttacaccgaaagtcgagccacaaccgttagcgattccgccgttattgaagccggaccgccagacggatacggatgattactataccgtcacggcgcaagaaagcgaaactcagtttttacctggtaagaagactaaaacgtggggctataatgcgggcttcctaggccaaactatcgtctttcgtaatggtaagcagacccatattgacttggaaaataaactcccagaattgacgactttccattggcacggcttgaatgtcccagggcccattaccgatggtggctgccacgcaccggtctatcccggtgaaacgaatcacattgactttaaagtacatcaaccagctgcgactacgtggttacatgctcatccgtgcccatcgactgcgacgcaggtctggaaaggcctagcaacgatggtgattattaaggatgacgttgaagatcagttaccgttaccacgtaattatggtgtggatgatattccgttggtattacaagaccgtgaatttcacgatgataaccaatttgattaccgggcggactacgatccagatggtgttcaagggcatacggcgttagttaacgggacggtcaacccatattttgatgtgacgacgcagcgggtgcggctacgaatcttggatgggtcgaaccggcgcgaatggcgtctgcacttcaatgacgatttggaatttgcacaggtcgcttccgatggtggcattttgccggcaccggtttatatgaccaaagtgatgatgacctgtgcggaacgggacgaaattgtcgttgatttcggtcagtatcagccgggcgatgaagtcacgctgatgacggatgatacgccgctatgtcgcttccgaatcaagtcgttcgtaccggatgacaccaaactaccagaacatttagttgatattcctgatgaaaccccaacacctgacttacctgttcgcacaatcacgatggatgggatggatgatgaagtcgcgcttgatggtaagaaattcgatatgagtcgcatcgacgctcggcaaaaagttggggatgtcgccatttgggaaatccgcaacaccaacagtactgaaaacggcatggttcatccattccacgttcatgggactcagtttagagttttggcacggaatgatggtccagtttatcctaatgaacatgggctgaaggatacggtcggtgtcaaccctggtgaaacggtgcggatcaaggtcaaatttgagctgacaggagtttacatgtatcactgccatatcatcgaacatgaagatggtggtatgatggcccaaattgaatcatatgatccccaacacccacaaacttatcatttaatggatatggacaccttacggaatgcttttgcgaaggaacaaggcatcaagcccgaagatgtttggatgcccggtatgtaagtgtagattaagctaatttagtgatgagatgtgaataaagtccggttgcaaccagcaagttatctgcttggtcgtagccgggctttatcatttaaaagcacctcggggtcaaaacggtggcggttttgaccccggatttaccatgttttaatcatgatttgtgacgaattagctcgtataaagacaagtaagtctgtatttctacagtttaggcgcagtaactggtacaattcaagtaaggaccgaaaaaaggaggggattaggatgcacgttgcagcaatgattatggcgatcttggttgccgttgaacatttatttattttgtggctggaaatgtttaatgcggatagtgaaatggccgcaaaagcgtttggaattccacggcaaacgctacagtcgccgtcagtgcaattattgtttaaaaatcaagggttatataacggtttcttggccgtcggtattttatacagcttgtttgtgattccggccgtcgcgagcgccggtgcaaccctgtttttcttagcctgtgtgatggttgccgcggtttatggtagtattactgtcagtcgcgcgatcgtcgtgattcaggggctaccggcattaattgcgtttattctgatgtattttgcttagccggttctttgaagtaatgccattatattagtgttaataaaaaacgttgctacgtgattctgtagcaacgtttttggttgtttaagctatccatattatatggcagattggattacactttgccaatgaccgtcgttttagcagttgctagcacgtgaccggcaatggcatcatgaaattcgttgagccagtatccaggttggaggtctaactcagtatcaagtgcaaatagtttaaatgaataacgatgatccttgtcaggcggatacgggccgacgtagtgttggctaactttcggatcagtctcgtgaacataggcgcccgctgtggaattattaccttggaccatcggaatagcaccggtctgactggcattttcagggatgtgagtcgtggttgccggtaaattggcggcaatccaatgaatccaggtgaagccacctactggaatcgcatcgtggtcaacgaaagtgaacgccagtgaatgggtgccagctggcacatcactaatgtcaacgggaaacgagatgatggggtggcccttatacgtttgggcaacggccgcttgtttggaataggtggctgcaagggcgccattgatggtcggaattgatagttgcattgcaaatccctcctcgtgtaattagtcttattataacgctaatagtcgctggcgtagtgctgggtcaaccgcataaatataaagcccataacgaccacgtttcatcaagacgttgattgagttaaagataatctgctgtttaaggggacgcagatcgcctaagtctgtccggtttttgaacgcttcttgatcttcatagcgttcagggcgaacgacaatccgatcatggtcttcatcatagcccacagaagggccgagaatgacccccgcataattcaaatcaaacccttgaatggtataaatagaaccaacttcattcagtgtctcaggtcgtaaggcccaaggatcatcagttaagttgactttatcccacggaagcttcaattgtccggccgtcacgtaccaagtgccatgattaacgacgtacgggaagtcagcggttgccaccatccgagcgagtccatactgctggtcgcgttgtttgatcaggtcgtataagggttgcccgtcatcaaaaaagcgtagatcaaagttatcgctaacgggttttggttgtaattgcccgcgggtaaaaccatcgatccagtcgacaacatcggcgccgccagtgacccgaaattgctcgtctaagttgtagctcgcgtgcgggtactggtctaaaaatggcttgagatcgttgctgtgccagtagctctttaacttcaagacttgacgggtgtcgaagacgaggacaacgacgcgactatgattgatcagttccgttaactggttgtgacctgtaaagcggttatagcggtctggttgcgtgagtaataggtgcgcttcgtcgataaaaacaacgtctgcttgccggtgttcttttgccaaccggttgatcaacggagtgggcttttggaagtcttttttgcgcaagacgggatcttcaccagctaagcgcttataaattttgagcatttcattgtgattgacgacgagatagttgtcagtggcctgcaaatcgtttggtgtcaagctacgattgagggcttgtagccgagcaaacgcggcggctaatacggcactcttgccagttcctgcatcaccatgaataacaaagaggctgggctgtttttgctggcgatgggtacggataaaagttaatagttggtgctctaatgattgttgtgccggtgacaacgcagcttgatcatttagcttgaacgttgcggcactgattgtagatgacatattttttcactcccaaacacattatacctgcatattggggctaattgaaatgagagtcattacagttggtggtagaatagaattatgacaaagtgtgggaggaagtaacatgaaacttgatttttcggtggcggtgcatagtatcctgtaccttgatgcacaccgtgatagtaaggtcgctagtcgggaactcgcgcagtcactgcatcttaacccggtgatgattcgcaatattttatcagttctacataagcatggatatttaacggggacggttggtaaaaatgggggctaccaattagacttggcgttggccgatatgaacctcggcgatctatatgatttgaccatccccccaacaattagctatgcgcgcttcattacgggaccatccaaaacggatgaacaggctgatcaatccccaattgcggccaatattagtgaaacgttgacggatttatttacagtagctgaccgtcaatatcgggcttactatcatcagtttacaatggctgatttacaagccgacctgaaccaccacggcacgtttttacgacacgaacaagattcagaatcttaagtaaaaagcgtcacttgattgaaaaataaggcgattttcgttaataaccttaatttgaaacgggtttgccattcaggattgtcagggctaattatcggtgctatcttagatgtcattatgaaagtggcattgagattgaaaggggccttggcaatgacagcacggttagtgttaattcatgaagttggtcgttatcgagaattatcggaacaacggtactggttagaatccgccgatttttggggtgtcgatgggcgtggcgcgacggtcaatgaggccgtcggtaactttttgaccaacctcgtgcaatattgccgcgactattaccaacgcggcttgtggcaacttgatgatcggttgttacagctagaccacgttgatacagtgttagcgtacgcgcaggcaggtaagtcaccagcaccattatttttgtttaaattagttccggcggatcatgagttggcgtctgcttaaacgaaatattgacgaattcttaaagaagcgttcatacttccaccacactcctgcgctaaactatgcgttataatcaaagcgtaaattaattggagggtgttgtatggaattagataagatttatcagttaatggacaagtttgaacaaagcagtttaactagttttgagtatcgggaccaagattttgaaattcaaatgggtaagaagggacacggcaagacgacggtgaccccgcagccggcgccacttcccaatcagccggtgattgacccaacgccggtcacaccgacaccggtctcaacagttagtaccccagttgttgcggaggcggaaccaaccccagtggcgaccagtacggctagcaatccgacgagcgttgtaacacctgatcctgaaccagaaccagcgccgattgatcctaaggaatgcgtgacggcaccggtcgtcggaatctattacccagcgcattcttcagaagaagcgccatacgttaagttaggcgaccacgttagcgttggtcaacaagtcggcctcattcaagcgatgcagatgatgcggccggtggttgctaagcaagcggggacggtcaaagccttcctagtgaagaatggtgaagaagtcaacttcggtcaaccattgattcaattaatcccagatacgccggatgacatttaatcaggtacggtcagtggttgctgagcgtattaagcactttgagtagcactacgtcttgataaaagcgtgacgcaaactaaaaatgaaccacttcaagcgcacatgataattgtgcaagctgaagtggttcattttttagcttaattaatgacgattggtagtgatttatttaggttggtcgatggctgccacggtttctaggaaccacttgttgaaagcagccgcatcaatatcgacacaaacggtcgcgttggttttgccgtcatggtaagcaccacgaatatcgccaacggtctcgccattagcggggccctccgtctggacatcaatccacatcctttcagtcgtaaaggcttctggatgtagtaagtagaagagcgtattgacatcatgcatcgcaacgccagtctggttgcggtcgttgtaatgaccaaagagggcgtgaagcatttcgccagtttttccgagggtcggtaactgttcaatcgattcgcgcgttaaaagggccttcatcgtcacgtctaagccgaccatggtaattggaacgccggattggtacatgatttcagccgcgtgcggatcggtaaagacgttgaactctgcggcgctggtcatattacccttgcctaaggccccacccatcgcaacgatttctttaatgtgtggcattacttcggggtaggtcttaaataagagcgcgatgttggtataggctcccgttggcactaacgtaatcggttgttcagcagccatgatgtagtcacggagcgcttcaacggctgtttctggtaatggttccgcaaggtcagtcgggaagtcgtaacccggcattcctgaaacaccgtgaattcggacggcatcttcaaacggtttgatcagcggttgggcagccccacccgctacgggaacgtcactgttaaagaagcgcgttagtttgagcgcattcagcgtcgttttgtcgaccgtcacattgccggcgaccgttgtaattaattgtaagtccaagtcaggatgatttaacgcaaaggtaattgcggcggcatcatcaataccagggtcagtgtccatgataatctttgttgacatgttcattcctccaattaaattgacgtgcttgaaattagttctattttagcatactacgggcaatgaattcgattgcaattgtgaagggtttgacgtagcatgacagtaaatacagttaacgatggaggaacggattatgagtcaaccacaggtcatcttaattacgggcgcatcttcggggatcggtaaagcaactgctttgaagttacaagctcaggggaacattgtgtacggagccgcacggcggattgaaaaaatgacggatttagcagcggctggagtgcacgttttaaaagtcgacgtgacggatgaagcgacgttaatcgcggctgtcaagacgattcaggtcgaacaggggcgcattgatgtcctaatcaacaatgcggggtatggctcatacggttccttggaagacgttccggtcgcagaaggcgagtaccaattcaaggtcaatgtctttggtgtgatgcggttgacacaattagttttaccgttgatgcgggcacaacatcgtggtcggatcattaatgtttcttcaattgggggtaagatctatcagcctttaagtgcttggtatatggggaccaaacacgcaattgaagggatgagcgattcgttacggatggaagtcgcaccatttggtatagatgttgtcatcgttgaacctggtggaatcaagactgaatgggctggtattgcggaaaaaaagctgttggcagtttccggtgaaacagcctatcatgaacaagccgttaaggtcggtgcgatgctgtcattgttcgatcagtttgcttccaatccgggagtgattgctaaactgatggttcgcgctgtcaatgatgtgaagcccaagactcgctatcacgcaggtatgggcgcgggggtctcattaacggctcgtcagtggttgagtgatcgtcagtttgaccgcatgatgaactcagccgtcaatggtgcggctaagctgtcaaaagttacgcggcgtaaggaccggcgaaccgggagtcggcattatcggcatggaaaaatacccgctaataataattaatctgaataatgatgctaagaagcgagcccaacgatcacagttgttattgtggtaggggttcgcttctttatttcaagtctaagctttaagcttcccccatgtagcatgggagagatagggtctcgttagttattattttagatggtgcttggatgatgacaagcaggtggattcttgttcggcagcaatgatcgtcctattccgacctccggggctgggtgacaattgccggaacgtaagccgacatcgatttgagcccgtgcacaaacccgcccggtctcaaatacgagtcttattctaagccggaagtagcccacttccgactaagaataatttggctactgagcattgtcacccagcccctccggtcggtaagccgctcgaatggctgatgaacggccacttaacttggtataattggtcgctgactattttgataatggagccttaaacgagaggttaggattacattaaccactttgttgaaacgtttgattattactatggtgattccgaaatagtaagctatcacaatgttactttctgcctgacagttgctcgacaaaattactgtttatgaagaacaatgatgagtccaataaaagttgggtgcctcaccgtcagccattcgaatactatcccgactggaaggcgtttctgacaatgcccagtggtgaaatttcacttagcaagcgtcttgtgcttggttagtgaaaggccagtatttgagacgtggtgtttcggcttaaatctgtgcccaccacgttccggcaattggcagaaatgcctggaagtcagtgtaggacgaactaaccaaacatgtttacgctaacccgaacttttccagcgggcctaagctggctgctttggacttaggtttgcaccgccattatagcttcgtcatcaccgccgttagcgtagtcgttgcggtggtcatcacgggatcgtccacggggtggtaggtgatggtgaggttgggaaattcttcgataatgggaatcagcgtttgccattggggtaggtctggttggtcggcttcgggaacgtcccagttgttttgccgccagcttaaataacgttgttcgctaataaccgccgccacttgttcagttgtggtgtgaatatgaacgggtaaatcatgacgtttcaacgtggcgagtgcggtggtcagagcactcaaggccagtgaagtttcggtatgtccgtagccaccgtcgtttagcgccttttgatggtcagcgtatcgcagaatgacgacccaggcagcgggggtcgttgcggtgatgttggtcgattggtggttggtacttgcaaggtaaagatgaatcgtagccattgttggggcctccttagttgtaatgataatccattgagtggttcatctaatagtttcgtaaaaactagccagcttcattttaaattaatgaataattttaacgtgaaactacaatagttacaaaatttggtgaattgccggtgcgtattactatgatttttggcggattatgctacgattaaatacatggataattaagaagttattaagtaataaaggtgagcactggaggttagcatgcagacattaatacagacgtttatggatcgacgcggggatttgctgactgcgctatggcaacacttggggatttcattagcatcattagtcatcgcaatggtaattgcgattccgttggctatttgggtcgttcgacgaccacggtgggccgagggattgttacagctcacgagtgtcttacagacgattccgtctttggcactgttagggttattgattccgttagttgggattggaacggtgccagcagtaattgcgctggtgatctatgctttactgccaatttttcaaaatacttatttgggtatctcagaaattgacgcctcaattgaagaggccgccgatgcctttgggatgtcacgaatgcgtaagttgtttaaagttgaactacccattgccctaccacagatcattgctgggattcggaccgcgctcgtcttaattattgggacggctactttggccgctttgattggtgctgggggtctcgggacctttatcatgctcggtattgaccgtaatgatacctcgttattattgattggggccatctcatcagcattgttagcaattctgctgagtgcgctcgttcggtggtttcaaacggctaaaccacgccacgccttaatcgtctttgtcggtattttagctttacttggtggtggcggggcttatagtgtctatgccaatcgagttgaaacaattacgattgcaggtaaacttggttccgaaccagaaatcttgattaatatgtataagcagctgattgaagctgaagatgagcatgttcatgtgacgctcaagcctaactttggcaagaccacgttcttattcagcgcgttaaagaataatcaggttgatatttatcctgaatttactggctcggtgctggagaccttagttaagggaaataacccagctggtcaaacagctaaccagacctatcagctcgccaaacagcgcctcgctaaacaggaacaaatgacttacttgaagccgatgcagtataacaatacgtacgcattagcagtgactaagaaatttcaacaagaacatcatttgaagacaatcagcgacttaacgcaagttgaatcgattctgaaacccggaatgaccctagagtttattgatcgtaatgatggcttaaaaggaatcaagaagacttatgggttagacgtgactgccaagtcgatggagccggcgctacgttatgaagccatcagtaaggggaaaatcaacttggtagatgcctatgcgacggatagtgaattacggcagtatcacttggccttattgaaggataacaagcacttcttcccaacgtatcaaggggcaccgttgatgaagacgagctttgccaacaaacatcctaaggtcgttaaagcgttaaataagttagcaggaaagatttcagaaactgatatgcaagaaatgaactatgaagtcaatgttaagaagcagtccgcttcgacggttgcacatcgctatcttgtgaagcacggtttattgaaggagggacgttaaatgacaacggcaattgaatttcaacacgtccagaaagactttaatgggcagaccgtgattcccgaccttaatttaacgattgaccagggtgagctatttgttttggtagggacttctgggagtggcaaaacgacgtcacttaaaatgatcaactgcttagagccattgacggctggtaaaatcctagttaatggtactgatacaaccacgataccagtccgaagtctacggtggcaaatggggtatgtcttacagcaaattgccttgttcccaacgatgacggtggcgcaaaatatcgccgtgattccagaaatgaaagggacagctaagaaggaaattaatcaaacgattgatgagctattggcggaagttggcctcgatccaaaggaataccgtgaccggatgccgtcagaattatccggtggtgagcagcaacgcatcggtatcttacgggcgattgcggcgcaaccagatattgttttgatggatgaaccatttagtgcgttagaccccatctcgcggcaacaattgcaagacttggtcttacggctacacgcccgctatcacaacacgatcgtcttcgtgacgcatgatatgaatgaggcgttgaagttgggtgatcggatcggtgtcatgcaacacggtcagttaatacaagtcgatacgccggctgctctggctcagcatccagtgaacgactttgtgcggaacttctttggtgcgagccgagctaaaaatgtctatgatgtctacgttgggcgtgtagggcttattcagggttatctcacagaagaacccagtgttgcgagtggtcggattcaatcgttagacgttcaagccacgttacgcaccgcctttacggcattgacagatcacgattatgtggcggtcacggaagaaaatcgagttgttggctatttggatcgccaacgaatcgtggcttacttgagtcaacatgaagaagtatcttaatcgtcaattaaggataaatcagttacactaggttgtgataattgatggtcgctaatgaatttaaggaggaatttcgaatggcggaacagtacgatgttgttgtgattggtggcggaccagccggcaatgccatggctagcggattaaaggctcagggcaagacagtgttgatcgttgaagcggatctgtggggcggcacttgtcctaaccgcggttgtgaccctaagaaaatcctgttaagcgccgtcgaagcgcgacaagcggcgcaacatttacaagggcagggcctgattggcgcgcccaaaattgattggccagcactgatggcgcataaacgaggctatacggatggcatcaacgatgggacgttgaacggactaacggggcaagatattgcgacgttacatggccaagcacactttcaatccgacaatcagttagcggtcggggatcgagtagtcagtgcgactgattacgtgattgctactggtcagcgtccagcgattctaccgattaccgggcacgaatactttaagacgagcactgacttcttagatttggaccagatgcctaaacgcgtgacattcgtaggtggtggctacgtaggatttgaattggcgacgattgcgaatgccgctggcgctgatgtgcacgtgattcatcataatgaccgcccgttaaaagcttttgatgcagatttggttaaggatttgatggccgcaatgacggctgatggaatcacgtttgacttgaatacggatgtccaagcaattactaaaacggcgaccggtctacaattgacagctgataatttcgagctgacaacggatctggtcatcagctcagcgggacggattccgaacgcggaccagttaggtctagccaacgtgggcgttacctttgatcggcatgggattcaagtcaatgatcatttgcagacggccaacccgcacatttatgccattggggatgtcagcgatacaccggtaccgaagttaacgccagttgcaggttttgaagcgcgttatctggtcggtgagttgacgcatcccggcgcagccataaagtatcccgttgtgccaacgcaggtttttgcagcgcccaagttagcgcaagtcgggatcagcgcggccgcggcgactgagcatccagatgagtatcgtgtcaatacacttgatatgacgaagtggttcacttattaccgctttggcgcacaacaagcccaagctaaagtagtggttgctaaagcgagtgggcaggttgtgggtgctacccttctaagtgatgttgccgacgagatgattaactacttcacgttgttaattgaaaaacacgtgactttaccagatttacaacggttggtattggcttacccaacgccggctagtgacttacaatatttgtattaatgtgtggttgaattaaatcaaagtccagctattcagcttaactgaatatgtcagcactaacggagtgaccaggaatgaccggccactctttttttgtttgaccggcgtttggagtggaatacgaaggccaaatgatgtcgcaaacagacggtcgtcattttcgttgtgcgactatcttggcgtgtaagtactgtgaaaaaatgtcaaaattgtagctcgtcgcggtggcactaatgttagtaaattaattattttatagaactagaagcgattgcttaaatgctacgatgcttgctatggcagtatcgaactgtgacatagtacaaactagttttaaagtaaattcaattgtgcaaaatttaatttatgcaaatctattcacaaaacggtcgcgacatggtatgattcaatcatcaattatgatagcgttttcataaaactgttatgactaaggagtgacacaccatgaccgacaagtacattatggcaattgacgaagggacaaccagtacccgcgccattatctttgaccatgcgggccataaagtggccgactcacaacgggaatttccacagtatttcccgcagccgggctgggtcgaacataatgccaatgaaatctggaatgctgtcttgtctactattgcgaatgccttcattgaatcgggaatcaaacccgctcaaattagtggtattggaattacgaatcaacgggaaacaaccatcgtttgggacaagcaaactggcttgccaatctataacgcaatcgtgtggcaatcacggcaaaccgcgccgattgctgagaagctggttaaagatggctatggtgatttgattcatcaacatacgggactcgtcacagacgcttacttctcggcaactaaaattcgctggatcttagaccacgtgaagggggcccaagaacgagccgaaaagggtgaattactctttggaacgatcgatacgtggctcctatggaaacttaccggtggggccacccacgtgacggattattccaatgccagtcggacgatgctcttcaatattcatgatttgaagtgggacgaccagattttgcaattattaaatattccagcggcgatgttgccagaagttcgcactaattctgaagtttatggcaagaccaaggactatcatttctttgggtcggaagttccaattagtgggatggctggtgatcaacaagcggccttgtttggtcaactggcgtttgaaccgggaaccgtgaagaatacttacgggactggggcttttatcgtgatgaacaccggtgaaaaaccccaattatccgataataatctattgaccacgatcggttacggcatcaacggtaaagtgtactacgccttggaagggtcaattttcgttgccggttcagcgattcagtggttgcgtgatgggattcgcctagttgaaagcgctcccgattctgaacgggcggcgcgcgaatcgcataatgaaaatgaagtctatgtggttccggcctttactggtttaggggcaccatattgggactctgaagcacgtggctcagtctttggcttgacgcgtggcacgactcgtgaagattttattaaagcaaccttgcaagcattggcttaccaaacgcgggacgtggttgaaacaatgaagaaagattccggtattgagattccagtattaaaagttgacggtggcgctgctcgtaatgactggttgatgcaatttcaggcggatatcttggatacgcaaattatgcgggctgctaatctggaaacgacagcgcttggtgccgccttcttggccgggcttagcgttggttattggcaggatttggaagaattaaaagcgtcatataagcccggcacgagttttgaccctgagatggggccagctgaacggacgaacttatacgagggatggcaggcagcggttaaagcgacccaagtctttaagcacaccccataccacgcaggaaaatagaggaggacaacaacatggcattttcagcaacgacgcgtcaacaaaatattgaacgcttacaaaatgaaacgttagatttactcgttatcggtggtgggattaccggtgccggtgtcgccattcaatcaaccgcaatgaacatgaagaccgggttgatcgatatgcaagactttgcagaagggacttcatcacggtcgacgaaactggtccatgggggcattcgctacttaaagacatttgacgtgggggtagtcgccgataccgttaaagaacgggcggtcgtccaggggattgcgccacacattcctaagcccgacccaatgttattaccgatttatgatgagacgggagcgaccttcgacctcttttctgttaaagtggcgatggatctgtatgataagctcgccgaagttaaagatcctaaattcaccaattataccctttcacgcgaggaagtcttacaacgggaaccacagctgaaccctaaacatttagttggtggcggtgtttaccttgattttcggaataatgatgcgcgcctagtgattgaaaacattaagaaggctcacgaaaatggtgggattatggcaagccatgtgaaggcgaccggcctcttacatgatgatgatggccggatcaatggtatcaccgctgaagacttattgactggtgcatcgttcgagattcatgcccgaatcgtcatcaatacgaccggtccatggtcagacacgattcgtaagatggaccatactgaaaagtatcaatcccagatgcggccaaccaagggtgtacatttagtcgttgatgctgagaaactcccagtgccacaaccaacctattttgattctggtgatcaagatggccggatgattttcgtggtgccacgtgaaaacaagacgtatttcggaacgactgatacggattatcatggtgatctgaaacacccgaccgttacgcaagaagatgttgattacttgttggaaatcgtcaaccgtcgttttccaactgccaaaatcaccttagatgatattgaggctagttgggccggattgcggccactgatcgccgctaacggtagttccgattataacggtggtaattcagggaaaatcagtgataagagcttcaaggaagttatcaaggttgttgatcagtttgaaagtcaggaagccagtcgtgaagatgtcgaaagtgtcctgaatgacttggaaacttccttggcagaggacaaactcagtccgtcagcggtttcacgcggtagttcgttgactagtagtccagacgggctgttgacccttgctggtgggaagattactgattaccgtaaaatggctgcgggtgccatggcgctgattgccaagattttagcagataagtatgacgcccactttaatgaaatcaattcgaagaacctccccgtttctggtggcgatattgatccgcacaacgtggatgcaacgattgcattttatgctaaacaagggacggataatggtttgacgaatgatgaagcgttgcggattgcaaatatgtacggttccaatgctgcgcgggtctttagtttgattggtaaagttgaaccgacgcatggtctgagtttagccgaaacgattagcttacgttatgctttggatgaagaaatgaccctgacgccagtcgactacttgctgcggcgcactaaccacttgttattcatgcgagatacgctggatagcttaaaggatggcgtcatagcgacaatggccgattaccttggttgggatactgcaacggtcaaagcacaaaccgaattattgaatcagacgattgctgaatcggacttaacagcactgaagcagggctaaggaatggggtggtcatgatgaaagatccattagcactacaattgttgggggaatttctcgggacctttatcttgattctgttaggtgatggggttgtagctggggtaacactcaataaatccaaagcgcaaaatgcgggctgggtcgcgattaccttaggttggggatttgcagtcacgatgggcgtctatgcgtccagctttatgagccccgcacatcttaatccggcggtctcactaggaatggcagtggccggtaagttcccatgggcctacgtgattccatatagtgcggctcagattgctggtggggtgattggtggcctcgtggtttggttgcactactacccacactggcaagcaactaaggatgctggcgcgattctcggcatttttgcaaccggtcctggtatccggcggtatttctggaactttatcagtgaagtgattggaacgttcgtcctagtttttggcttgttagccttcacgaaaggccaatttacggcgggattgaacccgattgttgtcggaattctgattatcgctatcgggctgtctctgggtggaacgaccgggtatgcaattaacccggcccgggatttagggccccgcattgcgcacgcggtattgcccatcgccaataaaggaacttctgattgggcctacagttgggtgccaatcgctggaccattggttggtggtgcgttaggcgcactgttgtttaatgtattgccataattttatgactgatttgatataaaccgtgaggactgttggaattgacaacagtcctcacggttttatttgtgagtaatgggtgaaatgaatgctttcattaactgagcaaaagacatctgctaattaaaattttatggtttggcaacatataaaatacctttcagttgggtagtcttcgattagcagaaaaaaggcttaatatttgatagactaggtgctattttgcattaattatgattaaaacgtaccaatttagttgaattactgattatcagtaaatgcggaccttattctaaaccggaagaaagccatagctaaataagcaagtttatacaaaattgtacttttccaactgatctaagctgattgctcttgtgcttagtatggcaagctttaaccatggtttagggtagaaaaatcagcatgatacgtaaagaatttatacaattgaaaatgtcaatgtatattgatattaatataaaaatatttattgttttttaacaaaatacatgttaacctgctatgagtagttagttagttgggtcgctttactatataagtgatagttagataaaaggggttaaacatgtatacggaaaacacggggaaacatcatcgtaatggcctgccagtttggttgttgccattactggtcgtcatctctttctggggtgtgtcacaaaatatcatggtggttgatgcttcatcatcggtcacggtcttaccaggcaacgggggcacgctcccactggtcaatcagctagtcatcaagcaaaatgacacggccttacaaggaatcacgaataatgctggagatcgtggcagtctaacacctaagaacggtgcgcaacgtgtgctcatacataaggtgaaagacagtgatacgattacttcaacctatgggacagtgggaactttccatggtcaggaagtcactgctaaagtaacaatctcacatattaaagttcacgacgacagccacaaggcaccgtcgggaatgaaacagactgacggggcgtttcaaattggtccgggcttttcttcggacacgaccatgtcaaatgtggcccaattcaatgtgagctatgaattttattacgctgatacgcatgccgcggtcaatattcaaaacgcgttcattacgctatctagtctggatggtccggtagcggggacgtcaaccggctttgaatatacggcttacttaggggctggtaagatttatactgttgaaaactcgattgttaagcaaattgcgaatcccctcggtggaggacaactcgtcatggctgggcaaacagcgcgtgatgcgagctggccatatacctcgtcaacggctgcaacttttggggtcagtgggacgaagctggaatttatctacgggacgacccgtgttaatagtggtaattcatggttacaaccagtctacaacgttagtacgatcacgctggggacgcccgccattgcgacgcccactttgagtgccacacaaagtgccactgacaagcaaaaccggacgttaacgtatgacttacaacaaaaagtcaatgttttggatcaggatttaatgaccaagtataaagattggtcagaaaatattacgattccggctaacgctaagtacgctaaaggcgaagtcgttaatgatgctggccaagcattacctagtactgcctaccaagtcagctatgatgaaaaaacacatcaagtgaaatggcatctgacggacgcgggcattaaatcgctaccgtttaaaggtgagacctatcactttaaggctcaagtccagttcagtgatgatgttgatgaccaggccaaagtaacggcaactggtcaaacggcaatagataagcagattaagacgtcgaataccgtcaccaataccattgacaatcaagcgaccatcacggtacatcattacatgaccgattctactgataaggttgctcctgatgaaacagtcaaagttggttacgggaaagcttatgatgttactaagcaggtcaaaacgataactggatataagcgtaatgccacattggatgaacatacccgtggcactgctagcaagactaccaaagaagccgtgatgtattatgatccgttgccatacaacattcatgtcaattacttgttaacggatgggcagaagctggacgaattggatgtcactggtctatatggtgatacttacacgaccgaggcaactgatttcgaagatttgtacacagttgatactgatcgcttaccgacgaatgcccagggaacggtaacggaaaagccaacaacggtcaattattattaccaaccaacgactgggcagtgggttgacgttggtaatcaaagtagtgttttagtacgacaagatacgaagcataatgtccgttctgtctcgcagatttatgccaacgatagtggttttacggtcaaatataatcaggatgcggctcaagttgcgattgcggctagtgatacgaacggtacccaagataacagcttagtctttgattataattcgaagtatacgtttgaattatctaagaatgagactgtcacttttaaggttgatgatcaaggccaagtgactgcgactagagtgttaggcgcagagcaaacggtcacgacttttgataaaagtggtcagctcaagacagtgaccacggtgactaacgcgaatggcactaagagccagcagaccaacacggttgacgggttgaaatcaatggtgactaacgcgaatggcactaagagccagcagaccaacacggttgacgggttgaaatcaatggtgactggcgaacaatacgacttaggattattgaatgggttgaaagttaccgcacaaaaagaaattaatccgagtcaagcagcaacgactgagtccaagacaacgactgatactagtcagtctggtagtaatcagtcgacaagtacgacagcgactgaccaaactgggactaatgaatcaactgctggtagttcgaccaacgcaacgaacgcgtccagtagtgtcgatgcaagttcagcgaatagtcaaggtgacactgaggctacaagccagtcgggtactagtgcaagtgctgattcaaagacggatagtagtgtggcatcaagcactagtcaaactactgacggtgaaacaaccaataccggtgatacgaccactggaacaactactggcagtgggctgggtttcaagtcaccatttactgaggatcaaaacacaagtagtgcactaggcagcgctcaaacttcgagcagtctcaatagtgatacgagtgcagcggtacaagcattgattgcagaacccaattcgacgccagttgtcttggatgaggatgcttcttttgaggaaggcgtgccagtcaatgatccggtattcagtaatgatgaaggtgtttcgccgaacaataatccaagcagcgcggcgacgccccttgcgcaagccacgaatacccgggcgcgtctgactcaaaatggcaaactattatatgaaggaacgctgaaggctgatcaaggggaacaaaatctctatgtgtcgccagatacaaatgtagaagttgatggtggggccgatggtgacggtttttacctagatacttatgatggtgataaaggaatggcctatacattgggttcaggttatgcgtgggcagccgaaaacaatgatgtgactgcggcaccagcaagtagtgcgacgaccagctctgagagtgctgctagtgagccgagcgttaatagtagtgatagtagccgtacagcatcaagtgcagtcgaccattcgactagttcggcaagtaccagtgatgcgagccaatcaagtcattcaactagctcgggtgaaagtagtcatccagaaagttcatcaggctcaagtacgaccagtgattcggctgacgtggataaacaggccgcagctcgttccagccaaactcagtcgaatagtgttaatggtagcagtcaagcagtgagctctagcacggtcactagtcaatcgtcagtaccaactaaagctaatacgaagcaggcttcatccacgccaacgaccaaggctaaccgagcaactgtcgcagccgctaccagttctatagcgccacggcagtcgcgggctacgacggcaagtgcgtcagttccaagtgtaacctcagcaagtgctgcagcggcaagtcgtgataagcaacgatcggcgttcaagaagcaacatccaatcttgaaccaaattttgcctaaaacgaactccgcggtcgcgacctggttggtctggctaggagtgggtttgttgctactcactgtagcgattacgatggttattaagaaacgagggcgtgactaatatgataaaattacgccaggttcttaaaaaaatcctcattggcctaatggtgtttgttctagttttcacggctttttccagctcggtcgacacagtctccgcacatcgccgtggtgtgacccacactcggaagcataaggtgcgacatagcgctagtggtcacgccaagaagtctcatcgtgcacatcgcaaagctaagcgcagagtcgtccaccgtaaagcaccgcatcggcggaaagttgcggtaaggcataagaaaaaaacgccaaagcgtcataaaaagtcgcataagaagaaggccgctaagaaacataagaaggcccataaaaagaaagcggtcaagaagcacaaaaagtcacacaagaagaaagcggccaagaaacataagaagtcgcacaagaagaaagcggccaagaaacataagaagtcgcacaagaagaaagcggccaagaaacataagaagccgcacaagaagaaagcggccaagaagcatggcaagtcgcacaagaagaagtcttctaagaagcatggcaagtccaataagaagaagtcttccaagaagcacggcaagtccaataagaagaagtcttccaagaaacacggcaagtcgcacaagaagaagtcttctaagaagtatggtaagtccaataagaaaaagtcttccaagaaacatggcaagtcgcacaagaagaaatcttccaagaagcacggcaagtccaataagaagaaatcttccaagaagcatggtaaatccagtaagaagaaatcatctaagaagcacggcaagtctaacaagaaaaaatcttcgaaaaagcatgcatccaaaggtagtgctgtaattgccacgcttagtcgtaagaccggtatcagtaaaggcatcatttcgcttttgacggatctagttgggtataatgatatttataccatgattacgggaaaagatgccgctaccggtaagaagcgctcgcggttagtaggagcggcttggacagccttgaactttgtgcctgtctcgaaagtcgctaagttagcaaaggccgcgaaggttctggcaactgctaagaaggccgagaaagttgcgaagaatggtggccggatcaaacgggccgctcgagcaactaaactggcgatgaagcgggcggctgagaagctagctaaacgaaagcccgccaaaaaggctgcgaaaaaggcagctgagaaggctcgtaaaactaaaaaagtcaaacatgcaaaaaatgtccgagcaacaggtcaagcaaagcatgaggcaacccatcgcgctggcacacagttatccaaagcaaaagctaagcttgagcgagagaaggcagccaagcatgtgaaaaatgtccgagcaacaggtcaagcaaagcatgaggcaacccatcgtgccggtacaaaattatctaaagcaaaagctaagttaaaaaatagaattggaaaagttcactttgacaaagacgatgaaagtaagactataaggaaccatatttacaaaaatacagaggggcattttccaaactggtcacaggaacatgatgatactttgcttagggtagcgcagcgtaaatctaattttaaacgtatggatatccatggtaatgactggtatgcagagactatcaaagataataagcaaatttgggttagagtccgtgatggtaaaataactgatggtggtattaacagccgaccagttcctgttatgaaagatggaatgcataaagtttcttggtatatcaagaatggagtgaaattaccttgacaaaaagattgagtgaacaggaaagttacttttcaatgtctgagtttttggactcttattattgggcaagcaaagatgatgatcttggaagtctattggggagtgtcacactttggagtgacgatggtgaattgtttgatcaagcaattgcggaagactggcacgcgttctttagcgacgtgagcaacgaaaatcacactgtgtttgagagttttcaagctgtcaagcagtttgtgaatgagtatttgccggatatcgcagcaacgacaccagtatcaggaagcttgacgtataacattagaataatttgtgagatgacagaatctcaacgaaatcaggaacccgtgtggcaaaattgggtcgcagctgttaattggattacgaatcctaatgttgtgccagtcaatgaatcgccctttcttaaaacggggcaatcattgcctaatccaaaggaaaagggttttcggcaaaatcaatttccaattgccaaggttttgccagcgccacgaccagaaattccgatggggcccagtctggaaaaggtggacttgacacagtcgtattatgcgtttgtgaaatttttacagcattattatcaggttagtgatgatagtgaattgggtaattttttgcagcaaaatagagctatcagtgaaaataatgaagaatatcgctattggaaggggaagtttttgagatgctctggtaataaaaagctattagatattttgaaggccttcttaatggtaagggattactttgaaattgaatttccggacaatgcactgcatacgcatcctgtacgtaaattgagttgtaatctctggaaggcagcgtatctgccacacagccaacgtgttcagactgaggtttggcagaattggttaacggcagttcatcaagtaatggagtaagtatcaatgtcattaaaagacaatcattttggagggtaagttagtgctagttattgtggttattggattatttttgttggcggttaccctaggtttgggatactggagttatttactgggaaaaaggaatcaatctaatcttgttggcaccattattccagtagcttattttgtcgttcgagcaatcttagcttggatgacacaaactacaacacatggcctagtatcgtcattagtcggtagcttgttattcagtttgatttactatggtttatttgtttgggggaagcaccgggctaataagtaacataaattagtcagattgagatgaccgatattcgacaaggattaaatgccgagtatcggttattttatagaaaatcttagacaagttgagttatgagagaggaaataatacatgctggtatttattgtaattggattgattacggcggtaatcacaattggcttgggttattggagctatattttagggaagcgtaacaagtcgaatatagtcggtagtgttataccagttgggtattttatcgtccgattagtctttgtgttagtactgggtgaaggcgttcgagaactgataaccagtttagttggtaatttggtgattaccgttatctatgtcctgttgtttgtttggggacgacaacgatttaataggcagaaaacaaaataagttggttaaaggttcagaacgctgatgaagcacgcgttttgggcttcttaggtacttacaagtgatgggtaccaaaatctatctaattaatgcagcaatcaaggcttttcaaaaaaacatctaagagcagtgctgaaattgccacgaatgccggaaaacagagcgaggcagcgtaatggcagttctaaacttaaggctatgttgttgaggatagcagttatcaaatgaatacccaactgtggcgttgccaacgatcaacgttgctaaggtgttggcaaaaaatgaacgagaattaattattttgatgcatattaaaaatcagtccgtcgtattctgccgtgataaaggcagagaatgcgatggactgattttttgaaaccactaatttaacaagctaggatcaatctggcggtctttaaagtagtacagacggtcgtgatcattaatgtgtcgcaagatatgggcgggattccccacggcgacgacgttatcaggtaagtctttggtcacgatgctaccagcgccaacgacgacattgtcgccaatcgtaataccgggtagtacgatggcacctgcgccgaaccaacagttacggccgatatgaactggcatattgtactgataagcttgttcgcgcaatgatggcaaaatcggatggcccgcggttgcaattgtcacgttggggccgaacatcgtatagtcgccaacgtaaatatgggtatcatctaccagtgttaggttaaaattggcgtaaacccccttgccaaagtggacatggtgtccaccaaagttactgtgaaacggtggttcgatgtaacacttcgggccgatttctgcgaacatcttgctaagtagaatttggcgcttggttagttcgctgggccgagtttggttgaaatcatagagctgatcgagatagccaaattggcgtttttcaagttcagggtcgttaggtaagtagagttcgccagtatgaagacgatcgttattattggtcattaattaaacttcctttcgtggatgatggctgccggtaatcaaggctaagccacctaaaatgagcataatccaaatgagaacgttggcggtgagcgtctgtggcccaagttggccgagactgttccagaccagtggcgcaaagaaagcgctgataatggtggcaatcgtcaggtagctactcaggacgttgacttgaatggtatccaggccagtattgctagtgaagaccaaatatggcccggtgtacgagtaaataaagttgaaaaatacggcagcgccaatagccacagttgcattggatgccaaccataatactaagactgaaatagctgctccggcatagcctaaggttaaggtgaaccggtgtaaatagcggtatagatagccaaaggtgagaccagccagcaagccaccgatgttcatggctgctaaggttaagttgatagtggcagcgttaccaaaatgactggcgctaaagtaactcggcagctttaattgaacgccccagatgagtagataggtgataaaggtaagtcctagtaacgtcaactggtgccatggtagttgtgtcttttcagtgcgtgcgtgattagtcgttgttgatggaacagtgggttccggtacgaaccacgccacgcccccagcaacaatcaccagtagcccgtatagccaaaagacggcgtgccaactgagactgatcagcaggcctgctaatcctagcaatatcgcgttacctagggctgagaggcccgtctggtaacctaacagtcgggcccgtaaatcaccggtaaagctgtgggtcaacaaactgatggcatgtggtgaaaagaggccgacgcctaatcctaatccgagccgactgaccatgattacggtaaagttagtcgtgatagcgggaatcagtcccatgatggcgctgatcaagagtccactaatcacgattggccgtaatccccaccggcttgttaatcgggggttgagtaacaaagtaatcaatgcgctacagttggcgatggtgacgagccattcaatcagcgtagtcgggacggtgggaaaggtccgtttgagctggggaatgattcctgtaataacggtagtgatgcctgttacagtggagaggctaagaatactgatggtggtggtcaaccgtggctgcatggcttacgcctccaaccagtttttgatccactgtaagacgccttgttcttggtttgtacctgtcgtggcgttggctacggctgtcacggctggttgagcattcgccatggcaacgccgcagccgacctcccggagcatttctaggtcattgcccccatcgccaaatgcagccatgtctgcgaggtcgattccgagaacctgtccgagttgcgctaagccagccgccttattcatgccgggttggataatgtcgatgtcgccatgaccactgctggttggttcggcgatacccgttagtaactcgcgtagttgcgtcacgatcgctgtggtgcgttctggtggacatgtgatggcgaacttcataatgtcatcatcaagctggtcgtaactttcaacgacggctaagtgatgataataatgtcgcatttgtgccacgtgctcaggattagtggtcgttagggtgtaggcacttttggcaccgcaaaccagtagctttaaatccgggatggtttgaatcttattcagaatcgtctggattgcgtctggctgaaaggcgttaagtgcgtaaacgtggtcggcatcgcggatataagccccattttcagcaaggtagatcatctcaggatagtccttgaagaaggacttgagttggaaatattgattgccgcttgcaatcacgaaccgtacgccccgtagttgtaattgttgataaagcagtgcaaattgagcttcgtcgtaagtcatatcgtcacgcaaaaagctgccatccatatcagttgccattaatttaatcatggttaaaatctcccgtcgtttaattgatagccgtagcttaccacgaaattcagaccacgaagggacatttttagaggcaactagtatcaattcggtgataccgggcataggcttgacgatagtcggtaggcgtcatacccttccaagatttaaaattccgattgaacgtcttactattcggaaagccgcattgcatggcaatatattcaatcttatggtcggtctctaacaggaggcgacgggcgttcatcaatcggatcagtcgtaagtatcggttaacggatagttgaacgtttgcattgaattgctgattcaaagtggtcaacgaaacgtgaaattgctcggcaagggtattaccatcgatgggctcagcgtaatgttgattgatggcagtcatgaccgtatccgttaatgtcaagttagggctgaccgttgttgcagtcagaggaacggtaaacgtttgacccagagtgacaagtaactggtaaaagtggctgagaatttgtaatctcagcagatcggtcgtgggggtcgtcaacaggtcgtgaatcgtgactaattgttggcggacatcggcgtaggcttgtgggtgagttttcgatgaggccgcgccgttcaatgtcaattgccagttcgcacttgccggaatttgagtttgtaagaaatcgtcgtcaatgatgatgccgaactctacccagtcaacttcggtgggcccactagcgctgtgaaccacgcgtcgattagtagtccaaaggtcaccaggccgatattcattcgtctgtccatcggtgacgaattttaaggtcgtaccgctgacgagataatttaactcaatcccttggtgccagtgtggggcaacgttgatatcagtcaatggatcatgttcgtaatatttaaaggggaggcggggaattgtctggaccgtctcgtgtaagattttcatcactaaacctcgcttcaagattttgtaaaatcgcaccgcttcctttcaaaaatcaaccttgatggctgacgcgctatgctatattagaattatagttcgcgatgagcggtggcatgacttaattgtaaccgtattcgcagttgaaaggaacgaaaacccatgacaattaaattaattgcgattgatattgatgacacgcttctggattcaaaggggcaattattaccaagtacgattgcggcagttaaggaagcccacgaccaagggattaaggtggttttgtgtaccggccggccacttgctggggcgcaacattatttagatgcgttaggccttgctggtgatgaccagtacgtgattacgtataacggtgctgtaatcgagagcattgctggccggatcgtcgccaaacatttagtggataatgcgcactatcggcaattaaccgcgtttggaaaacaacatcacgtgccctttaacgtgctcgatgcggacagtacgatctatacagctgaccgcgatgttaactgggtcacagttgtacaggcgtgggaaaacaaagctgggctgttgattcgagaccctgacgatttaccagctgattttcaaattgccaagggggtctttgtaggtgaaggcccgcaactcgatgccgtagaagcgcaagttaagacgacttttggtcgggacctgtacgtggtacgtgcggcaactaacttcttggaactgatgcatactggtgtcaacaaggggcaggcagttcaggatttagcggcagctctggaaatacaaccggacgaagtgatggcactgggagacgaacagaatgatctgccaatgtttgctttcgccggaacagctgtcgcgatgggcaatggcagtgatattgctaaggcacacgctgatcacgtgacggctactaatgatgcgaacggggtcgcagctgcgattcggcagtgggcattatcggattaactcggatgattatttttagcgaaacagttgacaagactacgcaatgagtttatgattgcaaatattaaaaataaatgagactaaacgtgatgatcaggagagtaaagtcagggtaatcttaagcgagccgctggatggtgtgaagcggtggtgagcctggctggaaagtagcctgagaactgctaatgcgacgagctggagtgttagctgggtgcccccattaacgggccaacgtatcgtcagttaacattactgtttggggaaacccgtcatcggtgttggtaattggccgtacgcgcaaaggtgacgagctgcggttcgtgacgaattaaggtggtaccacgcgttagcgtccttacaaaatcaattgatgattttgtaaggacgcttttttagtcccatggcagttgagaggatggagacaatgcgcttaacaagtagtgatggtggtttgtatcgagtgctcttactagtgattgttcaaactggttgatgagaacgacgcttaacggaggagagacgactatgcaaataacgcgaaaattaacaatcaaacattacatcattattggatcaatgctctttgggatgttttttggggctggcaacttgattttcccaattcacttagggcagctagcgggggccaattggttgacagctggttggggattcttgctgacagggacactattgccactgttaggaattatcgccatcagtgtgacgcacagtagtgggatttatgagctagcgcggccaattggtaaacgctacgcgacgatttttatggtactgacttgtgcgactttgggacccttgttcgcgacgccgcggacagccactacgccgtttcaaattggcatcgctagccatgtgagttcggcacaggcacagtggtatttattagcttactcattgattttcttcagtatcacttactgggcagctcgtaggcccacccggatcgtcgatacgatcggtaaattgttaaacccagcttttctgattttgctcgccttaatttttgggattgccttcagccggccgttagggaccacgaatgcgacaccgaccgcggcctaccaacacggcgcgttcttgaacggctttttgcaagggtataatacgatggatgcgttagctgccttgttgttcggaattgcagttgtcaccacgattcggggccttggtcaacgggatgccggagcgattgctaagacggccgccaagtctagtttgttgagtattagtttagaagcagtcatttatcttggcctgatctggattggcgcgacgtcgttatcgcaatttaagttgtctgcggatggtggcattgcctttggtcagattgccaatgcttttatgggcacgccgggtgcgattgttttagcgattatggcgaccttgacgtgtctgacaacggcagtgggtttggcgacgtcgtttgcggaagccttgcacgctaaatttcctaaaatcagttatcgcgcttggaaccgcttggcctgtggggcctcatttctcatcgctaatattgggttggatcaaattattgcatggtcgacgccgatgctgatgttcctgtatccgttggcgattacactgattatcttagcgattgcctcaccgctatttcatcgtgatccgctcgtttatcgatggacgacggcgttaactttgattccagcgttcattgatggtctaggtgctgcaccagccctgattactcggttaggatgggttcaaacgattcttgcatgggatcaacgctacttaccattagctaaactaggatttgattgggcacttcccgccattattggtctactgatcggcttgggctggcactatgcgcgccgcttccagaacgcccatgcttacaagatgagccaggactaaaggtgtatgatagatggtaagacttttgatggatgggtgagcacatggattttttgggaatactttgtttgttgattttggcgacaaccctcgctaggcactttgctcaccgtgcggggattcctgccgtgattggtgagattctggtcggggtgatattagggccggcactacttaactgggtccatttaacgactttagttcaaacgttctcagatattggggtcgtggtactgatgtttatcggtggactggaaagcaacttagcacttttacgtaagtatttacgccctgccattatcgtggctattattggagtgatctttccagtcgttattatggggcttgcgagtcgcttctttcagtttagctggtttgaatcactgtttatcggtgtcatcttttcagccacgtcggtttcgatttccgtggaggtactaaaggaatttaaagtgttggatactaaggaaggagccacgattctaggggcagcggtcgctgacgacattatcggggtgattctgttgagtatcatgattgcaatgatgggtggtcagagtggcgttgcccagactaatctcggtatcgtgctcttggaacaggttggcttcttcataggggtcttcatcgtgattaagtgggttgccccgtatctgatgcgcttgagtgatcatctgttgatggctgccagtccaactattatggcgattattatttgtttagcgttggcatggttggcagaactagtgggcttgagtggtgctataggtgctttcttcgccggagtcgcaattgcacaaactgattaccaacacgtggtggacgttagtattgaaccagtgggctacacgacgtttattccattattcttcgtcagtgtggggttaaatatgacgttcaaaggggtctggcaattgctaccgttcatcgtggtcatgacggtgctcggtgtgttaactaagttgtggggttgtggactgggtgcgaagttaaatgggttcagtcgccacagtaattacttagtcggtgccggcatgatttcgcgtggtgaaatggcactaataacagcacaaattgggttttcagcgcacttactatcaaacgattactattcggatattattttggtcatcattgtggtgacgatgattgcaccgttcgtcttaaagaacgccattcatcgtgctggtcaggtgactgcaacacatagcatcataaaagaacattaaccacatagattgggcggaagttaagaaccgcttggacgccgtagtatgggactacggcgcttttttagtctgatagatttgaacgaggcgtgagggtgttgtattagcatgttgacttattgtcgtggtggttgtcgactaaacggctattttcgtggtatcggtgaattattgtacgataatagctaaaaatatgacgtttgtaaaaatatcgttcgataggtcgggtaggtgttatattaaagctatagaaagcaattagtattgaattgataagcaataaaagtaaaccgaattaaaaatagtgtattgataaattggcttgtaattatagtattgcctaacaatattgagtgatacgtaatatacgagggggtgtttgagatggaaagtgaggaattgcatttcaaacgtatgatatgaaatgcaaatgaatttgtgtgagttgtcagcctcttgatgcatggaaaggatatattatgaataacttgaataaattttctactctaggcaagagtagcttgtctcaaattgagggcggatcagtcccaacttcagtatatacgcttggaattaaaattctatggtctgcgtataagcatcgcaaaacgattgaaaaaagttttaataaaggcttttatcattaaggagttggagatacatggataaatttgaaaaaattagtacatctaacctagaaaagatctctggcggtgatttaacaaccaagttatggagctcttggggatattatcttggcaagaaagcacgttggaatttaaagcacccatatgttcaattttaggagtgttcagtgtgattaataaattttttttgaaagacattaatttttggggttggttgattgtttttgtttttagcgtaaaagcagcagtgaatattgatatgagcagtttagactggattgtgcagactgtttttacaattgttagtattttaggcatttgccacgtattgtttcataagaaaagttttcaaaagtaattttatccccggtttattcatagaatcgataaaattaaaacatttcaaaaataaggtctgaatgagtcttttgactcacccagatcttatttttttgaggctgaaccaatcaaatgtagattcggcagctcagattgagcgctattctgtcagtttgggcagacttatcccttggttttacaggaaaatttaaaaataggactgctcgttgcgttaagcatcgaattcgcgttagtattgaccaatagacctcatcaaaaacgttgttactacttagttttaggatgtagcgccgggtatggcgctgacaaccgcagggatgtgaaaggcaatccaacggagtgttgtgagttgatagtaccgtttttccgtaggtaaaccgtttttttaaagccaggaccatattataggcggctgcactaagtaacagtcggaacgtattagctaggaaactatggctattagttttgtccataaaaaaacgagtttaacttctttaatgttattttccaccacgcctcgttgatgataggtagtgaacaaatcggtcggcccaaccgtgtttaaattagtgacgacaagctcatggtggtacagtaattcattactagggcaaacattctgggaaacggatcgataagatttagaccaagttgtgacttggtaatcaaactcaaattgatgggcttctatctttgaaaaatctggttggtcatcgtaattgacttggctttcggccagtgtaaccagtcggcggttacactttaaattgattagaaaatgacaatgaaattcatcgaattaaattcatcacacaaatcatataatgcgggtgtcgaaaagccactattaccgtgtactaaaatgtctatgtcgcaacttaaaccacgctaatggctgagaatgggacgtaaaaatctatcgacgtctttagaagtataaacgttaccgggtgctgtttaacagctaataataagtcggtgacactatcaaaaactaagattggttcggtatcgtaatgagcatcataactgacagcttcctgttgcccgtatgtatcggcgtgggtcgagtcaatatccagggctaatgtctgttaattataccaatcaaaagccgtatctggtacgtgcaacaatagctgattaaacttgtcgatgtttttgaccgttaggctattgataaaacgtgaaatggaaggctgtgaagctggtttagtcgtatttaaaattagtgacaatgagagcctattttgaattctttaatactgcttttgattggacaattcgggaaccattattcttcgtcagtgtgggtttaaatatgacgttcaagggggtctggtaaatcttggtcatgacggtgctccgtgtgttaactaagttgtggggttgtggactgggtgcgaagttaaatgggttcagtcgccacagtaattacttagtcggtgccggcatgatctcgcgtggtgaaatggcgctaataacggcacaaattgggctttcagcgcacttactatcaaacgattactattcggatattattttggtcatcattgtggtgacgatgattgcaccgttcgtcttaaagaacgccattcatcgtgccggtcaggtgaccgcaacacatagcatcatagaagaacattaaccacatagattgggcggaagttaagaaccgcttggacgccgtagtttgagactacggcgttttttgagtctggtagatttgaacgaggcgttagggtgttgcattagcatgttgacttattgtcgtggtggttgtcgactaaacggctattttcgtggtatcggtaaattattgtacgataatagctaaaaatatgacgtttgtaaaaatatcgttcgataggtcgggtaggtgttatattaagagcatagaaagcaattaatatttaattgataagcaacaaaagtaaactgattttatcgttaaatatttttaaagaatccgaatttttaaatcaaattgatgaaatataaatataggaaaaggtgattaaaatgaaaaatattaataattttcaggcattgcaaaaaaatgagctttctaaagttaaaggtggtagtaataataagttttggacttgggctggttacacatatgagaattggcgtatttcatcaaggcgagcgtttaatctacgtcagcgcaaaaacactatgactcatcattagaaagaagtggtaaaaatgagaaaaagcatcagtaattttaaagcattaaatgaaaaagaacttggcgctgttaacggtgggatttggcaatggattgtgggcggtttaggctttcttgctggtgatgcatggtcccattcagatcaaatctcaagtggaattaagaaacgcaagaaaaaaggttatggctactagcctttttatggttaaatacagttgttaaggtgggtgattaacctgaagaaaaatacattattcaaaggctgtgcgcttttaatttctcttttgtttgttcttttaatgtttcgggtagataaagacatgatatggttagcatatgcctttgcattgctagctatacctaggcccaggcccaaatatcctaaaagctatgacaaatggtactatatagcatttttatttttctgtcttgcatatttattagaagaaaacattttgggaaatttgggaattatagtagctgtaatttcttttagtccaactactcatccattcgctaaaaataacatcgataaaaaataacatgaacctaagtgcagcactaatgagagtttatcttcaattctttagtactgcacttcatttgacaattctggggcattattcctcgttggtgtaggtttaaatataatgttcaatgagggctggcaatcgttgccatgaggtgtgttaactaagttgtggggttgtagactggattcgaagctaaacgagttcaatcgtcatagtaattatttggtcggtgccggtatgatctcgtgtgaggacgatgattgcgctgagagcgctatttgtcgcgctaatcggtattacgagagtgcaatacttcattatttactggttgttgatattactatgaaaaacggctccaccgtggtaactgccacagtggagccgtttaagcaaaaattgaaaaattatattatctcatttgtcattttgacagaaaggcatacaaattcactcgtatttataatgtgctatcgcccagcagccccatcactaatcacatagattgcgaaaactacaataagcactaccagcaagcttctcactgggtatttcttaatgatgtttattgttttattgagcattaacgtgtgccttaccttttatatttaaattaatgtgccaataattaaaacggcgtctgagatccaatggacatagatgccgctccgtaaagtatttgcagatcgccatgaagcagttattgggtaacgcgtaataccgacgattaagggataaagccagttgaaatgataatgtggaaggtgcaaacacgcaaatacgatgcaccccaatacattgataatcggccacgcatatttttttagttgtgtttgcgataataagcgaatcaacggaattgaaatagaggccattccgacttcctcaccaactagtgatactagtagcgtgaaggctatccatactctttcaattaaaggataatctcgcccagttgaattagttgtcaatgttgtattatgaaatgacaataaagcatgcgaattaataatagctataaccacaatcgcagtgacttccagaacaaacagtaaaagcacatacttcatcactatacgccactttggtgagggcaatggttgaaagaatagttttaagttagaaaaaccatatagcattactaaactaattattccagctgtaagcattgctaaccaatcaaaataaatattaaggaaaatcgcacccatataaccagccacaaagagcactaatactagcgggtaatatcttcttttaaaatcaatttctatcatctattataatcctccgagacatcagttatagtgcgtgtgaccgattcaaacacgtattcaacgacattcttacgactctgccagcttcgccagcataaaatttgaaactagaccagaaatttttccaagagccttccaacaacgccattcaatttattattggaaatagatgcaaatgcgtctactgtatccaaattcttaagtgttttatccatagccataccgcgccatttactgcggtaattaaaatggttctatgagctatgtttttagtacatttattaagatacactacaattctaaaaaaatcatttttaaatttattatcgtactattcactcgacttaacgtaacttttagattgaatatctggcgattccgttccaaagtttttcgtggacgattatttaaggtgagaagatgatatggactcagactgtggttcttcttattaattgtttgttgtacttcaattgtaaatttgtcatttattaccccttttttgaaaaccaaaaaattatagtagcgataattcctttcagactaactgttcatgtattcactaaaaataacattgataaaaacaacattaatctaggtacagaattagttggagtttgtcttgaattttttagtgctatttttgcttgacaattctaggccattatttttcgtataaaactaagttaatgatgaaattgagaatttatgctgttaagaatggagtgatctaaaatgaaatccaacaatatgaaactgaaccgcgatttttataaaacatattctttttggctaggggtgttagctgtgattggtcttgtaggagatgttttattaaagtacaataccgcggttagtccgtggataatgatattaattgcaatctatttatttttgagagcctttacaagtaagagaaaataaatattattaacggtatttttggcattatttaaatttacttagaggaaatgatttgaacttgttcacgataaataacattaatctaagtgcagtactaatgggagtttatcttgaatgctttagcgctgcgcttaagttaatgttattttaccctctaagtatgttcaaagtaatcaagagctattcaaaatagtggctttgacattcatcaaatattgattgatatcatagtggaaattttatgttgattcacgtttaaattcaaaaaatgtacgttaatagaaataatcccagcgtacctcaaaaacaccttatcctaaaagcgaggtgattattatgaaaattcaaattaaaagtatgaagcaacttagtaataaggaaatgcaaaaaatagtaggtggaaagagtagtgcgtattctttgcagatgggggcaactgcaattaaacaggtaaagaaactgtttaaaaaatggggatggtaattgatttattgaataactgtttttcaagttatatttcgtatagatggcgtaaggtggggcatttttaaagagtcacaacacttgaaaagaagactataaaatgataattttgctgataaagtaaactaataatcattattttagaatagttagataatgatcgaataaaaaatactttagaggtagtagcttggttgaaatcagtatcttcgatagcgttattcaatcgtttttcatttatcttggcattatcttggtatataacttcatcttcagtaatacgaacattaaaagaatcatttattcgttgattttattactagtgctgtccttagtaggagctatcttggatgacactacatcgctaattttggttttgggggcaattattaaggaaaagtgccaaccaaaaataaattattatcatctaaatgtattcttaatgttgatttctagtcagatagtaattttagctttggcttcttatttaagtagaggatttctgtatatctacttagatgccgataaaatttctggcttgtcggagtatggtgatttattcattggtattgaaattattgtgatgtatattatcggatttttggtgttcaatcttgtgtacaaaatggtgagacgatacacaggctcgtttgatataagtgatgacgaaagaataaataggcatctattcattatattgttagctttctttggatcaatagaaatgttgttatttattagcaactttcaaggtgtaacagctacaattcaactaactttactgttgacatttgttttgatgcttgggcttattagttggcaaacattagaaacgattagagtatatgcttggcaaaaaaagatagcagctgaaaaattgcagaataagcaattaaatgattatcttaagagtgttgagcatcaatatctagaattaagaaaatttaaacatgattataagaacctaattgctagtttaaatactcaagataatataagtgaaattaaggattatttgaccgactatacccagagcggagaattcagagcaagcctaaatgacggtagcattgcaagtgttcagcatctgaagaatgagatattgcgcgggttagttgtacagaagtttttttatgcgaaacagtgcggggttaagttgacgattgaaatagctaacactgactttattctcagtcatggtgttacagtggctgtacgtattattggtaatttattggataatgccattgagcaagcccaaaaaatgactgataaaatagtgacagtagcttttaatgaaattgataacaccgctgaaattgccattagtaatcctatcgattcagattttaatcagcatcagatttttgaaactggttattcaactaagggtagtaatcgtggcttaggtctgactaatgtgcgggatcttgttgaacagcagaagggtttctatatggatattgaaaccaagaaaaattatgtcacaatgacgttaattgttacggaggataaataagtgtttccaatttatttattagaagataacgaggcccaaagagtagagtatataagtattataaagaatataatcatgattaaagaatatgatatgcagttggtggtggcgacaggagatttacaagagttaatgaataatgttatgaattctaaagaagggctgtttttcttggatatggaaattggggaacaaactcaggccgggttgaatttagcagatgaaattcggcagcagttaccttgtgcacaaattgtatttattacaactcatgaagagttatcttttttgacactggagcggcggattgcaccgttggattatattttgaaagaacaaggccttgatgatattaagcaaaaaatagttaaggatattgatgcaactcaaactattctcaagacagaaactgtgcagcataaggatattttaggttataaaatcggaacgcgtttcttttcagttcctattaatgatgttattatgctgagcactaataaagaacgaccgggtagtattaggctgactgccaaaaataaagtggcagattttccaggtaatttaaatagttttgaaaataaatactcacaattttttaggtgtgataaaagttcattggtaaatatagattatgttgatagttatgattatcaaaaaaaagagcttaccatgatagataacattaagtgcagtgtttcgtatagaaagtctcgggagcttaacaaaatattgaaaaagaaataggaaacttatcttttatagccagggcaatgaatcgtagtatcttgttttgagatagactgcttttcatggtaagagcaagcaaacaattatatttttgacaattttggaggaagaatgattgtttccaatttatttatacgaggataatgctgagcaaagagataattattgtaagaccgtcaataatacaattatgattaatgagtttgcaatggagcttagggttgcaacggatgatcaaaaaataattctagcagatttgaatcaacaacaagatggccttttctttttggatatggaaattggtgaggacaaacagactggacttgaattagccagtcgaattcgggcaacgataccattggctaaaatagttttcattacaacacacgatgagctatcgtttgtaactctggaacggcggattgcaccgttggattatattttgaaagaccagtctgctgacctaattacgcaaaggattattaaggacatcaatgtagtacagaacgaattaaaaaagactaatagtcagcgcaaagatgtttttaactataagttaggaacgcgatacttttcactcgcattagatgatgtgattttgttgagtacatctaaactgcgtccgggcagcgtacaactccatgctattaataaggttgctgagttcccaggaaatttaaatgcgctcgaagaaaagtatccgcaatttttccgatgcgataagagctcgctggtaaatttaaatcatttgcgaagttttgactataaagaaaaagagttgttgctcgacggtgaaattaggtgtaaggcttcgtttagaaagtcgcgggaattgaataagttgttgagagacaactagttttttaatattatttagagcttctgtcagtgttatttgacagggctcttttgttatgaatatgaaatctgattatataatataggcgctgaagatagttggagtagggctctaattgtgatcttatgagtattaaaatgactaaaaagtaagcacagtactcgatcgtaaagtatattagcatagcgttaagacgtgaaatttagttagcgatatgactagctcttagcgtaacccaaaacttcagagataattgaaattgtagtgctgcaaacaataatttataggaattcagaatggatgattactcgtctattttatcttcaatatttaggatactcaataacttccaatgcttagaggataggataaacgtagcaatgccaatgaataaaatatttagaaagagcccctttagaagagcttccattggcccgttaatgggtgattgagttggggcaataccttgagaatagaaactagaaaaatctatcaaccaatggacactaatggcagccagtaagcttccggtttttaaatagattgctgcaagtaaaatacctaacccaataacatagagaacctgacacaatactgaccatacgggctgtgataaaaggttgaccaaatgcatagccgcaaaaataagcgaagcagtcatcatcgaagcgatggtggcctgcaatgtggcaaattttttaaggtttagtgctaaaagcgttctgaatatcatgccacgaaaagcgtattcttcagttatcgctacaatcaacgaaagtaataatgagattaaaaattgatacatgtggtttcgaaagaaaataagtagaaatattattgctaggctcaaaggcagactattcttctttaatattgacatgatattaacgggtagccagtggataggttgcttaacatatcgcctattcagaatgattatcgcgattaatataatagattcagttaatatgaattgaaagggtccgtcttttattcccataatatcagtcaaaggattcattaaaaagagcactattaggtagtaaatagctgtgattattacttttattaatggcatagttaaaattccccccatataaactaaaaaggctgagcactgcaggcccagtcataaatcgagtgctttcttatagtgcttaaacttgatggcttgaactatccgtggatgaatcctcggacagcgctaatgacccaatcggcaggcccaacagcacttttataattattccgaacgccacgcgcgctataggcatggaaaacgccacctgaaatagcatttaattcacggtcacgcaaaactagaaattttttcataattgttgatctcccccaagaaaattaacgaatacttttcaaaataccacgaatgcctgcaactgaaccaattgcatcaacaacatgtcgaacacttttaccaaagttataaccgccccgattaaaaccaccagatattttggcaagctttttttgcggcaacctggaatattgtaacttctcaaactgtagcataaataatcccccttgtatgatgttatttggaacaaatttagtttaatttatttttttaccagattgttgaaaaaattataaaagtaaaaaaacgttctcttaacgtcaaataccaatgttagctagttgatgtttaaccgttaagcctgatgaggacatttatcataaaattatgtacgttaatagatagttggcatacgataacatttgttagcccataattaaatagataccgatacttaataattggtgaggggagtacaagtatgcattggagaaactatgttgcgcaagttgacgagatggactgtggggtcgcagctttagcaatgattttgaaaaattatggttcgacaacatcattggcctatctaagaaatattgctaaaacgagtttagaagggactacggcattaggattagtaaaaacggccgaaaagttaggttttgaaaccaaagcaattcaagcagatatgagtcttttcgaggtacaagatttaccattgccattcattgtgcatgttaccaaaaatggggatctacagcatttttatgtcgttgtaaaaacctcgaaaacgcatgtcgtgattgctgatccggacccaacagttgcggttatcagtatgtcaaaggaacggtttgaaagcgaatggtccggagttgcccttttctttgcaccgaagtcggaatataagccagttaagcaagataagggctcactatggggatttattccaagcttattaaagcagcgccgactggttattaatattgtgcttgctgcagttttaatcacgattattagtatctgtgggtcttatttcttacaagcggtgattgatacttatattcccaataatatgcacagtacattggcagtggtggccattggtctaatcgttttttatacctttcaggctatctttacttatgcccagaattttttattggcggttttaggtcaacgactttcgattgaaattattttaggctatattcggcacgtctttgaattgccaatgagtttttttgccactcggcggacgggggaaattgtttcgaggtttacggatgccagtaagattattgatgcgttagctagcacaattgtttcgctgtttttagatgtcagcatcgttattattatgggggcaatcttggtaatccagaatatgacacttttttggattacgttactctcgttgccaatctacgcggttgtcatcttagcctttaataaatcctttgaacgattgaatcaaaaggaaatggagagcaatgctattttgagttcagccattattgaggatcttcatgggattgaaactgttaaggcgctgaatggtgagacggaacgttatcagaaaattgattcagaatttgttgattatctacgtaagagtttagcctatcttaaagcggatactttgcaacaggcattaaaactgtttatacagttagtcttagaagttgttgttctatgggtgggcgccaatctcgtcattcataatcagttatcagttggggagctcatgacatataatgctttattagcctattttgttaatccactacagaatattattaatttgcagactaagcttcaaagcgctaaggtcgctaacaaccggttaaatgaagtgtatttggtcgctagtgaatttgaggcgtcacggccaattcataatgaaagtcaattaaatggtgatattaagttacaaggggtcagctatcgttatggttacggtgaaaatgtcttagatgatgttaatttgacgattcgacaacatgataaggttgcaattgtggggatgagtggctctggcaagtccacgttagttaaattgcttattgatttttatcaaccaaatagtggtgatgtcatattgaatggcttcaacgttaagaacatcgataagcatacattgcggacccatattaactacatcccgcaggaaccatacatcttttcagcgaccattgaagaaaatttaagattaggtaatcgcagcggtattactgagaaagatattgcgaaggcttgccaattggcgttaattgatacggatattaataaaatggccatgcaataccaaactaagctagatgagaatggtaatacactatcaggtggtcagcgacaacgattaacgattgcgagagcgttattatcacccgctcaagtcttgatatttgatgagtcgacgagtggactggatgcaattactgaaaaacaattaattgataatttagtggcaatgactgacaagacgattatttttattgcccaccggttgtcgattgcaaagcggacgaatcatatcatcgttctgcatgatggtcgggtcgctgaagaggggacccatgcggcattgttgaatgaacatggttactattacgacttgatcaatagctgaggggggaactgaataatgagaaaagacctgctcgaaagtggcgagttttacgggattcggtttcaaaatttttcaacattactaattattccagtgacgctattgttaattggtacgattctgttttcactcgtagcgaagcgcgagattgttattaatggtaccggaactgttcaaccgaccggaacggttccggtgattcaagcgactgtcaatagtgccatcaaaaagaattatttagttgaaggtgcgcgagtgaagaagggtcaaaagctattagtttatactaacgtttttaatcgcaataaattacgcgaagataatgtcagcaaacggcaattgcaacgccaagtaacagccttggatcattttaaagatggcatcaatactgacagtgatgtttttccaacgaccgatgaatttgggtaccgagaactattgcaaagttatttaaaacagcgtcaaatctatttaacagagaatcaaatgttggcagcgaaatcgagcgctgctagtactaagaaagccacgctaacgaagaccgcgcaacaagtggtatcaaatactaagaccaatctggatgcttatcaagccttatacaatgcggtggctaatggtagcaagtatgccaatagtgccaagtatgggtctgtttttaatgagtatgtcgctaagtcaaaggaggccaacaacgcaaacgataaaaaagaagttaaatctgcaacgttagcagacattcaacagcagatagatacgcttcaggattcgttgtcctcagctaaagtgcagttagaagaattacaagactttgatgatacgaagtacagtgttgagactaacaataccaaattagccatgttaaagaacgatcagttaagcgaagtcgctgagaaacgaatgaaagccgagcaagatttacggaccgtgaaagcagatattgatagcttaacgacacaatcaaaatcttacacgatcaaggcaaccaaagccggcgtcctacacgttgcagacaattaccgtggtgcaaagtacgttagttcaggagctgaaatcgctaaaattttaccgataatcaagcaacaacggcgagtgaacgttaagctatatatttcgacggcagatatttcttccgttaaagtcaaacaagccattagattcaaagtcacgcggaacgtaccgaagccaattattttggacggtgtggtcacaaagattggggtctcaccagtcgaggagagtaaagcgactttttatgaagtgacagcggccgttccgattacagccgatcaggcacagttactacgctacgggatgattgggcaaacggcgattattacgggcaaggtgacttggtttgattattataaagataaggtgctggataataattgatgattgaccatcagtactaactgactaaatatcactgtggtaaagtaaagttatctagaagcacatatatcatacgaaagaggtaagtaatggcacactcaaataaacaattcatcattaacctagtcattgccagtctaatcagcttagcattggtgagttttagtatggcaccggcgtatcttttcctaattaagaataattggctcatgatcacgattggttttgtaatctatgccttggaagcttgggggctatattggctttatcggcatacagcacgagttaggcaattaccaagtcgcgacgttgaagtcccgggtgaacattgcacaattagggactgtgattattgcgatgctgacaatggtcgtgctcattattgttgatcttaaattgggcgcgatgctaaatattcccgagaccagcaattccaggtcgttggcatggatgctcggtgaagcaccgcttcccatgattgtttcggtcgtgatattttcccccatctgtgaggaattgatttttcgcggtatctttttcagctacgcgttaacgaatcagtataatcaccgtaattatcagatgattgcggttgttattaatagcttaatatttgcaagtgtccatgttgatgcaaattgggagccgtggatttattatacgttaatggggagcatcttggggacaacttatttgttggctaagcgcgatattagaatgaatattctggtgcacatggggactaatttggcagttttcgcgttggcggctatgagttaacgttgtggataaaaattaaaacataagaattagtttatccacaggggataacttgggaggcttggtatggttgctcgattgatcagggtatttggttatgtgttagcgggtttagggctatttatattcattcaattaccggtgttagcggatggctattggaattggtggggtgaacgcccgcaacaaatcaacatcggttatcattgggtagcattagtcgttttaaccgttggtgttgcggtcgtactagtacgttgctatcaccattattttgagatgccagtcctgttagggcctttttcttggtcaatgatggggctgactgctttagtggcagtggtggtcgtggtgattcaaatggggataagtggtctgctagtcagtccaactgaaacacaaaatgatgaaatcatggcactgatccacagtccattggggttattaacattagtgtgcacaaacatcgttagccccgtactcgaagaattacttttccgtggaattgttcaaaatacgctgcgacgatacttgccagtattgggcgcgattatactgacaaacgcagtattcgcactcggccatggttatcagttagccagtacggtgggcatcttcattacagggtgcggtttttcatggttagtactcaaaacaaaacaactgagtaccgcaatgggatgtcatatactggtgaactggctggtcacacttattaacatgatgtggggataagtttcagttagtgatatccggtcaaaccgcaagttgtggattaggtaccattggggataattatcaagaaatgaatgtgaaggagcatggtacatcaaaacgtcaaatttattagtagattactacttgccagtttattggcagcaatcgtgatgggtcttagtacggcgcccatcgatattttaacactcaagtataactggataacggtggcgatcttcttggtcgtctacctgtttgcaatttatttattctatcgaatttatctggaatcagttactaataatcattttaagattacgaaaatagctgctaagccgagcgcgcgtcaattagtgattacggtactggcaatggtggtcatgctgattttggcagcggtgcaagttaaatttgttagtgatgctgtctattcaatcgcggagaatgttgctgacttgcaagcattgtctcagcgctcaccgatattgatggcgttggccctgggtgtttttgcaccgatttgtgaggaattaattattcgcggcaatttcttcagttatgcgctggcggaacgttttgatcagccacgataccaactagttaccgttattgttaacggcgtgttgtttggtctactgcgtggcggttttagttgggtgcagttgtcatactatacggttatgggtctcgtactcgcggcaacctacatattatctggccgggatattcgagtcaacagtgtcgtgcacgtcacagctaatctgggcctcatgctaatggcatgaggccagatggacttggcaagtaacttgagtgggttgatttaaaagcccgttagtgaacattctagttacgattgtttggatggagtggatgaaatgttacagaagaatttacggtttattggtaatttactaattgtgagtgtgttgagtgtcattattgtcaatatcagttccttacccgtgtatatttacttgattacggccaattggtttacactgttagttagcttcagtttatatgccgtgattatcgttttcttgtacaacatctataagacgaccgcggaattgcggcaatttgattttcgaccgtggcgaacgcggctaaataaacgggccttgctactcatggtgatcggcgcagtcattatcgtggcgcttgcttttggctatgctaagctgacggcggtatggcacatcactgaatcgggtaatgaacgtgcattagatttactgttgcggaaaaatccggtagcgatgacactcgatgccgtcatttttggaccaatcgctgaggagctgagtttcaggggctttttctttagttacgtcttgtcagaccaatatcttgaccgggagtaccaagcggctaccattgttatcaatgggcttcttttcggttatctgcatagcggaaatagcttggtgccattagcatattacacgctattcggcatggtgctggggaccatctacctattatctaagcatgatattcgtgtgaatagcgtgacacatatgttagcaaatctggggatactttggttggttcctagctaaaatagttactttggattatgctaaagtgaacaaggtaacaggtagtaagaatattgtgaatacggtgataaaaatacaaagttggttctgaaaactgtaattgatggatatgtgatatcagaaggagtttggtaagtatggatgaaattatatcgtttgaattctctaatggttcgaaaattttagatagtaatatctatgaatataaagtaggtaaagaaagcgttactaaaatagacttgccggatagcaatggatttgtggctgttcataaagataataataaaacagagtatattaaggctctatatatgaaattttgcacagatagccatgtttaaaaatggtcaagcattagtttcgtgataacgaaaaacgactggaagtagctagcgtaataccgctgggctacttccagtcgttttttaattccagttatactcgtacctgatgttcaatcgtaaataatgtcgggtccaactgggcaattagtggggagacatcaccgatgctgagcaatgtcaagtggtgcatcgctcgtgacgcaatcgtatataagatgccaactgaatccgcatcgggataattggtagcggagacatcgtatgcgaccaccgcgtcaaattctaacccctttgcaaggtagattggcataacaatcacgccttgtggcatggtacggtcgctatcggccatcaacgttgttactgtatagcgcttcaggtattggtagacctgcttgctttctgctaaatctttagttagtacggcaacggtgttagttgccttgagctgatgttcaacttcgctacgcagactgctgagagcggcgtcttcgccatagcgaatcatgaccttaggtaaatcgcctttacgtgtgaacgcttgaatctggtcgccgtcgggtaatagcgctttagcaaagttcgtaatctgttcggttgaacggtagctcttattcaacgtaatcaagttcgcccgtcggacattgaaagcatccttgaggcgttccagtaattgctgtggtaactcaatccccttgaataatgcttgttcactgtcacctaacagtgtgaacttagctagtgggaacgcgtgcttgatatataacagttgtgctagcgaatagtcttgcatctcatcgacaaagatatattgcatccgccggttctgaccactgccagttaggacatcgcgtaataacaatagtggcgcgcagtcaaccagagcaatccgatggtactcaacggcggcctggtaagcggcaattcgttgttgccattggtcagacgtcacggtagtgggccaatcaacttgcgctaagaaatcgttatattgttcataggtgtctaagaagtaaccattatagatcgcatcgtagacttgccgcagtcgtttggtcacgatttgcttaccaatatagaagacttcatcgtcgagtgattgaaaatcaccgcggcgcttggaacctaataagtcgtggtaagcttcgtcgctcaattggtcaatgatatcattgacccagtcagcttgggcttcatcgtcaatgcgatgctttaagcgtttaatcaaagtgttcttgattgctaggaaacggtcagctggttgcatcgctgctggtaaggccgtcgcaatctttgtaatgacctctttagcgaagaagatttcgccattaaagacgatgttggtgaagcgtaattggtcggctggtagctgatggcaatattgatcgacttggcgcataaagtcggcgctttcttgaaaatcgcgaattgccggtgtcagttgttcacgctggcggtcactttcgtagcgctcaaagaggctttcaacggttaggccttgaaaacgtgcactgagaaattcggcaagcgtgacttgacgcatattgcgctcccctaaactaggtaagacttcggagatgtagtgactgaataagcggttgggcgagaataataccatttggtccgcttctagggaagcccgtgagtggtagagcagaaaagcgatccgttgtaaaatggcggacgtctttccagagccggcaaccccttggacaactagtaagtcactagtggtgtcacgaataatatcgttctgttctttttgaatggttgctacaatattttgcatgtaggcatcattttgttctccaaggacggcctgcaagatttcgtcaccgaccgtttcattcgtgtcgaacatattcttgatctgaccatgattaatctggaattggcgtttcttgatcagctcggtcgtctgctgcccggccggtgtttggtactggacctgacccagagtaccattgtagtagactgaggaaatcggggcgcgccagtcgtaaactaagaaattctgttcagcgtcgacaaatgaggcggtgccaatgtataaacgttcggtttcctcgtcgggactatcttgaatatcaatgcgcccaaaatagggtgagttactgagatctttcaagacaccgacttgccgtttcaagatggcttcggattccacggcgcgttcaaccatttgcttttgttgttgcagttccgcgttcgtttcaatccggtcatcgacttcaaacgtgttgacggaattattatcaccatagtttttctgaatgacatcggtttcgtgatgagcctttgccagcaagtcgtcggtctgttgtgcccgttctttaacttgctcgatgactcgatcaacccgttgttgttcgcgttgttgctcttgatctgatgttgccacgtagagggcctcccgtctgataatcgtctaaatcgcttgaacaattttaggcgggtttgggggtgatgtcaatcaaagcgcctgcaaattcactgatttatcagtaattgttgtgaaatgtgattatgagtggcactaaggcgtgctggccaacggtgggcaagttcggcagctttacgatggcaaggctgaagcttgcaacctatgactatttattctaatattattttaatcattctaataaagtgggtggaacgaatgcgtgtcgcactagcacaacttaatattcagtttggagatccggatgccaactacgagcagattgaagtggccattcaacgggcagctgagcaaactgtcgacgtgatcgtcttaccggagatgtggaataccggttatgcgttaactcgcctgaatgtcttggcggatgatgatgggcagcgaacgttacaattactcagcaagttagctcggcagttttgcgtaaacattgtcggtggctcagtcgcggtcgctcgcgatgggcattactataatgagatgttagtcgtcgatcgtcagggacagttactgagtcgttacgataaagtccaccggtttgggttaatggcggaagaccgttatattactgctggtgagaccgagaacgtttttgaactcgacggaactgttgcgatgggggcgatttgttatgacattcgtttcccagaatggcttcgtaaacaagcagctcgtggcccccaagtgatttttgtcagtgctgagtggccgacagtgcggcagatgcaatggcggctattactgcaagcacgtgcgattgaaaatcaagcattcgtggttgcggttaaccgcgttggcagtgatcctgataatcaatttggtggtcagtcactagttattgacccgctcggccaaattgtggctatcggtggtgcccatgcccagttgattacggccgagcttgatttaacacaagttgaccaggttcgtggtcagattccagtgtttgaagaccggcgcccggaattatactgaagcgtaaattggggactggggctgggagcacttaactgaattttaatggtgttgaaggaacgcccgcttgaatttcgatgggcttaaacgtcgaaatgacggtcgttatgttgaaatggtagcggctagttaacgcgaatgatgtccagaatttattttgacacggtcaggtataaccagtacactagaactaattaatcgttgaagaaaagaacagtaaggcgtccaataacagagacctagcgcgtgctgaaagctggggcggactaatgaattggctttttggagattcggtgaacaccggggacccacccttatcggtcaatgagtggcagagacaagctttctgcaatttaggtggtaccacggtgatgcgtcctaattaactagtattagttgatcaggcgcttttttagtgccaatagaaaggatgaatacaatgacaaaaaaagtgattttaacgggtgatcgccccactggtaagctgcatatcgggcactatgtcggttcattacgtaaccgggtcgcattacaagattctggggactatgactcatacattatgattgcggataaccaggcgttgacggataatgcgcatgatcccgaaaaaattcgtaaaagtttattacaagttgcgatggactacttggcagtgggaatcgatccccaaaagtcaacgatcttagtccagtctcaaattccagcattaactgacatgatgaatcaatacttgaacttagtgacggtagcgcgcttgaatcgtaacccaactgtgaagacggaaatcaagcaaaaagcttttggtgaaagtgttcctgccggtttctttgtttatccagtcagtcaggccgctgatattacggctttcaaggcgacgactgttcccgttggtgacgatcaagaaccaatgctcgaacagacccgtgaaatcgtacggagcttcaataagacttaccaaactgatacgttggtcgaacctgaaggctacttcccaccaaagggcttgggccgaatccctggacttgacggcaatgccaaaatgagtaaatcactaggaaatgcaatttacctttctgacgatgctgatactttgaagaagaaagtcatgtccatgtataccgatcctgatcatattcatattgaagatccgggtaaggtcgaaggtaacgtggtcttcacgtatcttgatattttcgatgaagacaaggccaaggtcgcagacttgaaggccgcctaccaacatggtggcttgggtgacgttaagattaaacgctacttgatggacgtgttggacggtgtattgcggccaatccgcgaacggcgtgcaatttacgaagctgatccagctcaagtcttacaaattttgaaggatggtacagcgaaagcgaacgtggtcgctgaccaaacgtggcgtgaaatgcaagacgccattggaattaattattttaaataaatcatggtagaaaaaagtgcaactgaccgtcggatgtgtgaagacggtgagttgcacttttttgtacgcccttaatatggggttgtccggtaaattaataacgatggcccaacgcatcacggttgctaattaaaaggaaaagacagactaaattgaaaattagactgatttcgtttgctttcttacatgaataattgtaaaaaagtgcttgttaaaataagtttttggcaagaaaaggggtggtaaggaatctgaaaacgcttgctgtggctggctttggtcataatataaattcattggtataaaattacgaaaaataaagcgttttcatatattctgtgataatataatttgtgggcacaagttttacaagcacctactaatttatcgaaaggaggtttagtcatgtatcaggcaattgcgcaggcaatcattaaatcgataatggcggatgaatatccgaccaagttaccaaccgaaaaagtgttaatggcgcagtacaatgccagtcgcaatacgattcgtaaagcgattgatgtggtcttccggcatgggttgttgcgtcgtgtgcaggggagcggcaattttattatcaaacaaccgcagaacacgaagaaagtgctcaacttatcgattggatttgaccagtccgccatggttgagggtggaccattagtatcaaaagttgtcacatttgataaagtgacagcggatgagactttagcacaacaagggaacattgcgcttggtgacgaggtttatcgggtggtgcgattacgttatttgaatgacatcttgtatgacctggaagagtcttattttccgcgaacggtcgtcccgttcttatcgagtgagagcgtgcagcattcaatcttcgccttcttgcgagaggcatatggtattacggggagcaccacggaaaactacgtccatcaagtgcgggtggacgcgcaacgggcggagttgatcggttgcccagatggtgacaaaacgttgtgcttggaagcaatcaattacttggctaatgggacggtctttaacttctccaggacgttcttcgtctatccagatttggaactctattaccataccgaaaatattgatttacaaaactagtacgggggtgacgcaacagttgtgttgggtcactaactagcgaaaacctacattaggagtgaggggtatattatgaattcatttatcgaatggcttaacaaacacttagtgccagttgcggccaagattggtgcagttcggtggttgatcgcattacgtgacgcgtttatagcaattatgccggcaatgatggccgggtcgatcgccacggttctgaacgctttagttcgagatattccaacgaagttcggttggatgggcattgttaattcgatgcagtggttgattggaattaatgcgatggtttggacggggacgttagccatcttaggtctgattttctcatttacattcgggtatcaattggcaatccagtacaaagttgaaccagttactggtgggatcgtgacacttggaactttcatcatgagtttgccacaaaactttaccggcacgttgacgagtacgttgagcaagggcgctactaagattttgacggactctggcatggcggttgctggcaaaaaggtgacggcttggggttacttcaacttcaacacgtactttggttcgtatggtttctttacggtcatgattttaggggccattgcgagtgccgtttacattgctttgatgaagaaacacattacaatcaagatgccagattctgtgccaccggcagttgccaacgccttcactggggttatcccagccgccgctgcattttatgtcgttgggattattaactggatcttcagtaaattcaacaccacggtgattgaatggatcgcgaagattattcaagaaccactattgaatatgagtcaagggtacggcgccgtcctcttaatgacgctgttagttcaagttttctggttcttcgggattcatggttccaatgtactggcaccaatcttggacggaatctggttgacggctcagcttgctaatgttaacgcttaccaagctggcaaagccttgccatacgtttggacgcggaactgttttgacttatatgcatggattggtggggccggctcgaccttactattattagtagcgattttagtatttagtaaacgagacgaccaacgttcagtggctaagttggcgattggccccggattctttaatattaacgaacccgtgatgttcgggatgccaattgtacttgacccaatctactttattccgttcgttttagcaccagttgtgactgtttcgatcgcctacgctgctttatcagctgggtgggtcgcaccgattacgaacaatatcgtttggtcaatgccaccgattatgaacgccttagttgccacaatggactggcggtcagtggtcttacaattatttaatgccgccgttgcctttgcgatttacgtgccattcgttaaggctgccaacaagattaaaccagcagcgattggagaatagattgtcatgaaaagcttaaagcagtgtttactcatcgggatgaaccttggattattagccgttatcttaagtcccctggccggaacgaccggtcaatgggtgacgctcggattaggtttagcggtcagcgcagcacttttcgtcgtttatcggcgagtgggtcagatagaaaggagccaccagaatgcagattaaattaactttgaacgcccctgtggattatttataccaacagttgatcgattccgcgcgggctgatattcagcagcaaacgggtcggccggcgccacggcagagcttacaaggctatgagtatgccaaacagtggtccaacggtctgaccggtaatttgaagattacccacgcgcaacccggtgttcgatatgcgtatgaattagaaacgccccgcgatcattacggcgtcgattatcaattcgcaccggacactgatggtcaccaaactgtcttagaatatgccgaaacctttttaggcaaggataagaagacgaatgccaataataagttcggcgtgctattcttaggatggttccgtaaacgccgctttaagaagatgatgaatcagatggctgctagttataatcaataagcaggctggattcaaaaattgatttcgttagaagagtgctgtaaatccgtaagtggatttacagtacttttttgaacagatatggtacacagcgtttcagatgtggtcgtgataccatcacgatggaacaagtgagcaactgcattgtaagcgcttttaaaacgcatgtagttcacttatactagcttttgtaagttaaatcaaagggaggaacaacttatgatgaacggttttaacgtgtttatggaaaaacacattgtaccatttgcagtcaagttgaatgaacagcgacatgtcgcggcaatccgtgatgcttttatgtacacattcccaattacaatggctgcatcgttagttattttaattaataacttagttttttcaaaaacggggtttattgcacaaatcttatttttacccaaattttttccacacttggaaaatgcccaaaagttattaacctcagtaactaacggaacgatgaatattttatcgatttttattgcgtatctggtggcacggaatttggccaaatattttaaagctgatgacatgttagtagggatgacggggattgcctgcttcatgattttatactcaccatcaattatcaaagacggtgtaacctatttgccaacgacttatttaggtgcacaagggctgtttgttgcaatgatagtaggtggcttagttggagaatttttaccacggctaacgcgcattaagaaaatgcaaatcaaaatgcctgagatggttccgccggcagttgcacggtctttcaatggcttaattcctatcgttattatgattatgctgttttctatgttgaactatgggttatcactaatttcaccacaaggaatcaatgatattatttataaatcaattcaaacaccattaacccacattggggtcaacttatttggcgttatcattattgctattgttcaaaatcttttgtggcttgtcggtatccatggtccaaacacgttgaacgcgttacgatcaattatttttactgaagctgatttgaaaaaccaaacgtttattaacgctcatggtacagcttggggtgtgcccaaccgtgcaacctggagtgtgttgaatgatgtcttcgccaatatgggtggtagtgggatgacacttggcttgattattgctatcttcctcgtctcaaggcgtaaagattatcgtgagattgctaaattggcattagtgcccggcctcttcaatattaacgaaccgctaatgttcggtttaccaattgttttgaatccaattatggcgattccattcgttctaacaccagtgatcaatatcttggttggctatacagtgacagttatttttaactggataccgacgccggcttttggattgacatggacaacaccgggaccactgatgccgttcttggggactggtggcaattggcttggcctgattattggatttgtttgtttgggaatttccgtgttgacgtacatgccatttgtactcgctgccaataagatgatggctgcagatagtcaatctaaacaagatacggatacgacgacagaaacggttaaagcatagtttaaaaggagtttaacatgacgattaaaggacgagcgtttccagaagggttcttatggggtggcgcagtggctgcacatcaactcgaaggtggttataaagagggcggcaagggtctcagtacggcagatattatgacattagggacgaatgagcgccctcgtgaaattacggacggagtagtggctggcaagtattatcctaatcatcaggcaattgatttttatcatcgttatcccgaagatattgaattgtttgctgaaatggggtttaagtgttttcgaacatcgattgcctggacgcggatcttccccaatggtgatgaaagcgaaccgaatgaagctggattacaattttatgatgatttatttgatgaatgccttaaaaatgggattcaaccagtagtgacactagcacactttgaaatgccatatcacttagttaagcaatacggtgggtggcgtaatcgtaagcttattcaattctatttaaactttgcaaaagtatgttttgaacgttatcgagataaagtaacgtactggatgacttttaatgaaatcaacaatcaaactaattttgaatcagacggtgccatgttaacagattctggaatcattcatcaaccaggagaaaaccgtgaacgctggatgtatcaggcggctcactatgaactggtggcgagtgccgcggcggtacagttaggccatcagattaatccagattttcaaatcggttgtatgattgcgatgtgtccgatctatccgcttacagcagcaccagcagacgtcttatttgcgcaacgagcgatgcaaacccgattttattttgccgatgttcattgcaatggcacttacccacaatggttgcgtaatcgttttgagtcggagcattttaacttggacattacggcagaagatttgaaaatcttgcaagctggaacggtagattatattggatttagctattacatgtcgtttactgtgaaggacacaggaaagctagcttataatgaagaacatgatttagttaaaaatccatatgttaaggctagtgattggggctggcaagttgatcccgttgggttacgctatgctatgaattggttcacggatcgttaccatttgccactgtttatcgtggaaaacggtttaggcgcaattgataagaagacggcagataaccagatacatgacgattatcggattgactatttaacggatcatttacgacaaattaagctggcagttctggaagatggggttgatttaattgggtatacgccatgggggtgcattgatttagttgcggctagtactggtcaaatgtccaaacgctatgggtttatctatgttgatgagaacgatgatggttcaggtagtctaaaacgttataaaaaggattcatttacttggtttcaacatgtgattgcgacaaatggtgccgaaattgagtagtgcgatttgggtatgacgatggtcattaattattgactagtgcttaattaatgatgtttgaaatagttgtcaatggccagctttgatagctggccattgggcgtttaggaggactgttaaatgacaatgtatattggaattgatattggtggtacttcaatcaagtgcggcctagttgatgctcatggacatattagtcgtaaagtaacacgaccgactgccacagcaaaggtagacattatggccgatttagttgcgatgattcaaggactacaagcagatggacaagttgctggtattggagttagcatgccgggagttgttcaaagtgacggcttcttgacgacggcaggtgcggtcacggcgtttgaaaaaattaacttgcaagctgagttacatgcacagacgcagttaccggtcattattgaaaatgatgccaacgcagcggctattgctgagcaatggctgggagtagctcagaatgtgcctaattatttaagcttggttcttggaaccggggtcggtggggcactggttatcaataatcagatttatcggggtgcacacgcgcgttcaggcgaatttggttggatggttgttgacgatgatgagattgatactgaaatgggaacccttaatttccggggtgcaacagttatcggtctcatacgacgttataatcagtttagtgcgatgccggttactgacgcgcgcgagatttttgaccgagcagatgcgggagaagtactggcacaacatgtctttcatagctactattacagtttggctaaaggaatcattaatttaatggttgcttttgatcccgaattagtcgtaattggtggtggcattagtgcgaacatgacctttatgactgatttgaatgcaacgattgcagacttacaggctaatcataatagtattaatcatttgactttggcatcagtagtaccagctaaattgcggaatgatgctgggatgattggggcagtgtatcagttgattaagcgtggttaaaaaggcggatcaaactggtttattaaaatagggtgacacgtattttaatttaaaaaatgaaaaagcttgaatgctagatgttttttagaagcggttacgcatttatggtaatctagtgaatagattattagatagggtggtggctaaccatggcattctttggctataaggatatcgataagttatctggagtagatttagcaatttatcgatttattgtggagcatgatgagcaaatcccgtatatgcgagtccgtgagttagcgcggggtgcgcacgtttctaattcgtcagtcatgcgctttattcgtaaaattgggtatgatagttttccagaatttaaagtatcgctacgcagtgaaacgcccattcaaaagccggatgctccaggtattcagtttgttcaaccgagtgcctttcctgcagatattactaagattattcgactggcagctcagttgatggtcaatgcggataatatcgtgtttgttggtatcggagcatcagcggcgttgggcgagtatgcttcacgtcaaacgtcatcattaggatttaatagttatgtcgtcaaggatcctttctatccactattaccacaattacgtaatactagtaataacgttttggtggcagtgtcagtctccggtcagacgtctgagttggttgaaatgcttaatgactttgtgaataatcctgaagtcaatattattagtattacgagtaatcttgagagtacgattgctcgaatgagtcgatatgcgttaacatatcgggcgactgaggagcgtattcatcaatattatgacttaactagccaagtgccatgcctttacattattgaggcactgttacgggaacttcgtcatcaagaagtcgtccaacaccggtttgagtaaacttttaatttatttagccagcaaacgtcattcctgcaaagcaggcatatcaatgctaaaattaaaagcattcaatccaaaagttaaactagtgataagggagtatgagaacgtgacagcaacaccattctggtcgcaaattgcggcccaagccaaggcagacgggcgaccattttttacgatggccccgatggaagccgttagtaatactgtttttcggcaagtcattagccatgccgctgctccagatacgttttttagtgaattcgtctatgctaagagtattacgaacccgaatacgaagtttccggtgcatggtcgtttgtacgtggcggcagctgagtcgcaaaaaccggtcgttcaactgtggggtaacgaagcggctgactttgcttcggctacagctgaacttcgtgaccggggctttgaagcagttgatatcaatatgggctgcccggatgggacggtcatcaaaaatcatggtggcagcgatttgattcgcaatccgcagtgggctgaagacgtgattgcggctgcaaagacgtcgggactggccgttagtgcgaagacgcgcttaggttacagtaaagttgctgaatatcatgactggattgcaacgttgttatcgcaagatgtggcagtcttgaccgttcacttgcggaccaagcaggaaatgagtaaggttcccgcgcactttgaagttgtagatgacttgattaaaatgcgtgatgcaatcgccccggaaacgttactccagattaatggtgacgtggctgattatcaggccggggtggcgttagccaaagcacatcctggattagatggtatcatgattggtcggggagtgttcgcgaatccgtttgcatttgagtcccatccccaatcgcatgatttgcatgaactattaggtttactgaacatgcagctcgacttgttcgatgactttgccacccgttatgacgtgccgcgttttccgtccttaaaacggttctttaaaatctatgcgcgcccagaactaggcgccactgacctgcgtaacacgatgatggatgccaagtcaacggatgatgtacgcaaaattttagcggcttatcaagtcaaaatgcgggtgaccaatcacagttagtgtcagcagcagacaggttgattaaggcagtaatacgttaataaacttcaatcttattatatagaaacatctcgatatcggcagtgagtgctaatgttgggatgtttttgtatctaaaggggtatgacaattgtattcacatttaggcccttgttaggagttggtccaacagctgttcaattcgacgtttttttagaaaaaaacttagtcacttttaagtggaacaggcgtcaattgacgtaaataatgactgatggcaatgactagcggagtaattacggacgattgccgtgtctatctgattaatgaggaggtgctcaataacaagtttcggtcacgtgatagtgttaatttttgcttgtagctcagctaattaggatgattgtaacatcatttaaaacgattgtaacattactgcgttacaatcgaagaaaacatgttacaatcatttggatggagggggcgaagaatgtgataaagcttgttaaccaactagaacatattagtcaaagtacgggtatcccggtaactattggcgaatcggtttcaacgtcgacattgtcgttgagtcgttcggatcaaaataatacggtggttgtgcaggggacaatccttgataagccggtcctttttatgtcttatggtggtcagcgcgatttgcggccactagggctctatgcacgagttagtcaggtaaatcgagacccattggtgtttatttttcctcagctttccgccaatgagcgtcacgaatatttgaaaaacagaatgccatttatgacatcagatggtgagatgtttttgccgtttatggggacacggttattacctgaagccgtgaataactcacctggaatagcgggcaatcctttagccttcgcggcacaacgactagcattaaccatcgtattagcacagttgatttttgaacgtcatccagagaaggccaaagtatgtcccgagttagcagccttcagaacgactgatgaccgtttcttgatcaaaagcggacaatgctttgcatcaacgattggcaagcaagttagcatcaataatcgagttacctttagtcgagcggttaaaccgttagttgcacatggttggctgaagtcaatcggcgagactaaggagcgcgtctatacttgcgagttagatagccgccgtttttttgatcagatagcgccattcttagtgtcgccagttcaatctgttgacttggtgcagttggcgaaagcatcagttgaatcagctagtaagaattttctttattccggccttactggtttatctaaagtgacgatgatcagtgataatcggaagcaacagacagttattatggaccgttctcgacggcaaaccttgaggacaacggttgacgcagataccgatgagcggaaagtcgcttgtgaggtgcaagtttcaaagtatcagctcagcggttttaacacattgtttagactaattgccaattatcctaagaatgtgttggatccctttcatttatacgtactatttagaaatgatatggacgagcggactcaaggcgaagccgaagaattggttgatcaaatttggaacggagcataaggtgatgctatttcacaagttctttgactttttcgaaggctatgaagattgttacgttattattggtggcaatgctgccgcaatttggttagcgcaagatcatcaggattttagagcgacccaggattacgatatggtcgtcatatttgaaaatagtcaactgggcttttcacaaaagtttgatgactttatcgagaaatatggctacttgtgtgctgagatagggggtgatgtgaataagaagaaagtgtattaccggtttgcgttagatcctgcacttgcggtcacgggcgtcccccaacagattgaattgttttcaaagataccattgcgctatgaacttagattaccgacagagacaatgccgttacattttgcaacgggccctagtttgtcggcgattgtattaaatgatgattactatagcttgttgaagcaatgccagcaaaagattggccatgtttctatcttaagcgtacccggattgatctactttaaagccaaagctcatcttgatattcggcaacggttagcaaatggtgataaattacgtcatcgtgctaataagaacaaacattataaggatgtctgccggttgtgtgatttgattattgagaatcaaacgttcgactcaaaggtcgtaccaaggacttgtcagaatgatttaaaaagttttattcagctggttgaagcagagcccgagcaaatattcaaaaaacgatttaaatcagatcccgattttgacttaaaccgggacgaagttgttcgagttctccgatcgttactgccaactagctagtctaatgaacccaaaatgaacggccctagtcaaaacactagcgtcgttcattttgggctttttgatattttttggtgtgcaatccggccctagaagtcacagtgttacatcataaatgttagaataaacctaactaatattttataaacgaaaagtgagcgtggtgttatgagaaacttagcgattgtggatttagggtccaattcggcgcggatggcggtcagtcggttgcatgctaacggcactgctcaagaaatcaagcgtgttaaggaagatacgcgtttgtcggaaggaatgggaacggcacacgtactccagcccgccgcaattgagcgaacaatcaaggcgttactcaattttcgccgactttatgaaaaaatgcccaatacggatgttattggcatcaccacagctgcagttcggatggcacaaaatcaggctgaatttctcaatcaagtcaagcaagaagtggggctcgatttacgagtcttatctggtgacgatgaggcctattacgattatcttggggttgccaattcattggtcatccatgattgcctaatcttagacacgggtggcgcaagttgtgaactgatcttggtcaaaaatggccgcaaacagcaactgatcagcattccatttggcgcggtgacattatcggaacaattcggtctcgacgacttagtgccgtctgcgagtctatttcgggcgcagatgttcctacgtaaccgactggcagatatttggtggttatcagaagcagtgcacttcccaatcattctattgggtggtgccaaccgaaccttagcccgcattaatcggcgccggcaacaaaagttaaaagttgaagatattcacgggtatcgtctgaagacagagacggtgttccacacgtttttggacttactgtcacggtcgaaaaaaggtcgccaggaaatttcaggaatggaatatgatcgtgcggacattattgttggtggaatgttaccgctagtgacgttattacagatgttggatagtgatcgggtgatcttttctgaaagtggtgttcgtgagggaattatttcagaacacctcaatcaataggtcggttcggtagatgagtcgaatggagagaataggaatgagaatatgacagctgattttcggcacttttatcaaaaaaattgggcggaacgcactgccatcgtagcgcaacaggcccatttaacgccagctgaacaggcgttatttaaacaatattatttaccacaacatcatgaaattattgagaattatttgacggattacccattaccgatggggttggctgtcaacttagtcgtcgatggcgtggatcacattgttccaatggttactgaggaaccttctgttattgcggcagcaagtaatggcgctaaaattgtcaagtgtgcagggggcttcacgaccgtccttaatcaacgtgaaatgattggtcaaatcgttctggagcagttgtctgatccggctgcaaccgctgccgtgattgaagcccacgctgcagcattattaaaagtagctgatgcggcccatcccagtttaaaaaaacgaggtggtggcgctcggcgcctacgtacgcgtgttctcggacaaggctatttatcaattgacctattcgttgatgtgcaggctgctatgggggccaatatgctcaatagtatgttggaagccgtggcaaagtccatcggtgtgatgacgaagcaggacgctttaatgagtattctatcgaattatgcaacggcgagcttagtcaaggccatttgtgacattccggtcggattattacaggctgggcggtatgccggcaaactagttgcccagaagattgcgtcggccagcatggtcgctcagcttgatccgtaccgggccacgactcataataaaggtatcatgaacggtattgatgctgtcgctattgctagtggcaacgactggcgcgctttggagagtggggcacacgcctatgctgttaaggacggtcaatatcgtggcatgagtacctggaccagtgatggtcggatgctgcatggtgaactggaattgccactaccggttggcattgtgggcggttcaatcaaaattaacgagttagcccagttgaatcaacgaatattaggtattcaaacagcgggtgatttggaaagaattatggttgccatcgggttagcccaaaatctagccgctttacgcgccttggtcacgactggtatccagcagggccatatgcacctacagttgaaatcgctcgcgatggcagcgggggctactcctgaggaactccccgttatcttacaacgacttgaattagcatctcaacaagacctcgcaaccacgcaacaactcattgcggaattgcggcaaacaaaggaagagaccgatgactgaaattaaattgaaccaaactgttacagatttattaagtaccgccaattcgttatatccgggcaatattagtgttcgttttggtgacacaaaagcgggttacgtccgccatgatcaagcacaacaagtgttagatgatggtgacctgaccgttcgggttagcgatattacggctcctaattacacagcgtcacatgaattattacatctattattgttattacaaggctttccacagattacctttaatttaactacgcgtgatcaacaattggacgaacaattgatggcaatcgctatggaactttatgacatggtgagccacgtcttggtcgtacgcaaacaacgggaacatgacttaatcgatgagcaaatcgaaacgctatacatgcaaggtgtggcggccacaatcgaaccggaacctgcgggcaaggcggatgcgatgatgacgttacggttattaacattgactgacctactcgttttctttaatggtgaattaacagctgatgatttgcaaaaggtgacaacggcctatccacaagcttggccggctgcacagaagctatacgccgtaatcagtcagaagccagttgataccccgttcactatgcggcgtgccgtagtaaagctgttcaaggcttttgatgatcagatgacggcttggcatttaccagtcctacacggaacggaatttgtgaccgttcagagtgtgctcagtgaacggcaagagcggctggaagtccggcaattatttgacgtttaccattcagatctattagataaaaataaacatacccgagcgtacattgggttatataagagtgaccgtcagaatgcgtttgtcttaccagcaccggcgcaaaagaagagcgatgcctttttcaaagaggtgtacgataagacggtcaaagaattattccaagaaatgaatctaccctatacgttacggtaagctaagcagggagatgtcagaatgagtgacattacagcagcacaaacaactttacaacaagctcagcatatcgtttttatgacgggggccggcgtttcgacgccctcgggaattcccgattaccggtctaaaaatggactgtataccgaacaccataacgcggaatattatttaagccacgcgtttttggcggagcatccgctggaattttatcaatatttacaatcaaatttatattatccagacgcccaaccgaatgtgattcatcaaaagatggcggcactgactcggcaagggcgggccagtgtgattacacaaaatattgataatttatatggggtggctaaaacggctcagctcgttgaatttcacggtaatctctatcagatttactgcaccaagtgtggtcagcatgtcgattggcatgagtatttgaagtccccttaccatcagacagaccatggctacttacggcctaacgtggtgttgtatgacgaggggattgcgagtgccaatatcgaacgggcagttcaatatttacaacaggctgacctagtcgttatttgtgggacctcgtttcgggtgtacccgttcgccggcctaattgactatcgtaatccgaaggctcaagtgcttgcaatcaatgcggaaccgctccagttgccatttgcatttacgatggtgcaacaagatgcggtcgacttcttcgagggggtgcaggtctgatgataacaattggcttaacaacttggacggaacaccctagtttactgggtggtactgaaaagctgaccttaactgaatattcgggagtcctaccagtcgtcgaagtggacacgccattctatggtattccgaaagtgacgacggtcgcgaagtggcaaaaggccgtccctgataagtttcagtttgttttgaaagcaaatcaggtgatgacgctgcatgacacttatgacgaaggggtctcgatggatgcgctaaagacagcttatcgggaataccgtgcgatgctcaaaccgttaacgcagcaccagcaattaaaagcggtgctcttccaatttccgccgttctttgaacggtcgaaccgcaacttccattacctacaacggatggtcgagtggttacccggtgttccaatcgcagtcgaatttcgtaaccagagttggtacgaggagagtgtcaaagatgcggtctttagttttctgaaggatctggggattacccatgtgattgtcgatgagccgcacgctttaaatgatggcgttagtttcgagtcggtcgtaacgaattcgaagttggcactcttacgcttacatggtcgtaaccagcagggctggtcagccaagggcgctaactggcgtagccaacggactttatatcggtatagtgatcaagaactagctgaattcaagcaaacggtggaacagttacaacagcaggcggacgaggtttgcgtcatctttaataataattctggtggtgacgcggccgataacgcgatggcactcaaagagttgctaggcgtttcgtttggtgatttaggaccgcatcaactggacttgttttaaaataatttatgagtgattgatgtgatactttgcttaattgaacgagttatcagttgaattactatgttggctcaatacagtcagtatgaccgtgaaccgttgaaatttggtcgtacggttgaatattctttaattgatgaatcaggacaactaaaaatgtagcggcagttcggacattcaataatgtgagctgccgctacattttttggcacttacaccttagctaatcaatatggacttagccatctgatttgaaagcgaacggttgggatacatcatttggaagtaaagttagtgtaaagtcaagaagtagtttatgtaaatccctgtttagttttggtaataattatccgttggtcgtggatacgatggcttggactgccttaaaactagacagttataagtaccttaattcatgattcttagatgaattagggtgattgagaaaagtgcgtgattaagatacactgacttcagttcaagcaactaagtagttgcctgccactatgtgagttgcagatagttatggcaggttgaagtgttgttgagaatcgaatgttaggtcataaaaatatagattggggcggattgggtatgcaaccggatattatttgcgcaaatggggttttctgcgctgatggaaaagtcttattaacacgggaatcaaaaaacacagcctattattttcctggtggcaaggttggtgtgggagagacgctaacacagactctgcagcgagaattaaaagaagagttgtcattagttgtgtcgccagatcggtttaagtgggccttcacccaccgtggtgtggcctataatcaaccgggaaaaatagtcgagttaaattgttttttagttgcggggagtggcgcgctcaaagtcgactcggaagtttatgattataagtggtgtcggccggacgatagccggatcgcggaagtcgttcgtgaagcgctggcccgatattcgtgggttgttgaataataatagattaccaataaatgaccggttaaaatcaactcgtgattttaatcggttattttgtggtggttggttgggccatttgaagcatggtgcacagttgactagtctgccacgatctttgcgtgtggagaactcttttgttagtgtttcttaataaacacaggaaatatgatacaatataagagattctacacattggcccagcaacatgttattttagaccaagacgtgttgtttggacgcgtgtgatttgttcatggattttaatcaaagacatgcttaacgagttaatcataaaccagtttgaagggaatttacgtcatggcagaaacaaaaccaacttattatattacgacgccgatctactatccttcggggaagttgcacatcggtaattcatacacgacaattgcgtgcgatactttagcacgttacaaacgtgcgatgggttacgatgtttacttcttaaccgggacggatgaacacggcctcaaaattgaagaaaaagcagaaaaattgaacactgatccgaagtcatacgttgatgggatggcaaaacaaatcaaggatttatggcaattgctagaaatctctaatgacaagtttattcggaccaccgatgattatcatgaacgcgcagtccaagaaattttcgatcggttacttaaaaatggtgacatctacttaggtgagtacgaaggctggtactccgttgatgacgaagaatacttcactgaaacgcagctggctgaagttttccgtgatgataacggcaaggttattggtggtaaggcgcccagtggtcatgaagtcgaacttgttaaagaacagtcctacttctttaagatgagtaagtacgcagattggttgttagattattatcaaagtcatcctgactttattgaaccagctaatcggatgaccgaaatgatcaataattttattaaaccaggtctggaagacttggccgtttctcggacgagctttacttggggtgtccctgtcaagagtgatcctaagcacgtcgtttacgtgtggattgatgccctgacaaactatattacggcactgggttacgcaaccggcgactccgaagacttgtttaacaagttctggcctgccgatgttcaaatggttggtaaagaaatcgtgcgcttccatacgatttactggccaattattttgcatgcactcgggttaccattacctaagaaggtctttggtcatggttggttattgatgaaggacggcaaaatgtccaagtctaagggtaacgtgatttatcctgaaacattggttgaacgttacggcttggatgcgcttcgttattatttagttaaagccatgccttatggtaacgatggtttattcacaccagaggactttgtggcgcgggttaactatgacttggctaatgacttgggaaacttgctgaaccggaccattgcgatgatcaataaatatgaagatggtcaattaccagcattcaaagccggtgtgactgaatttgacgctgacttagaagccacagctgccacgactattaagaacttcaacgcttgcatggacagcctgcatttatcggatgcgctggctgaagtgtggaagttggtcagtcggacgaacaagtatattgatgaaacggcaccttggcaattagctaagagtgacgatgcgaatgatgctgataagttagccagtgtgatggcccatttagcagctagtttgcgggtgattgctagtttgatcagtccggtcatgacgcatgcacctaaggaaatctttacccaattagggttggacccagcaactttagcaattgccgacttacaactggctgatttgccggctggcgcacaagtcgttgctaagggaaccccaatcttcccacgggtcgatatggatgccgaagttgaattcttgaagggtaagatgacgaaatccgacaaacagaaggggcgtaaagccatggaaaacgcgaaacatgaagctgaagtcgaacaaggctggaacccagctgagactaatttgaacctcactaaaccagcaattaccattgatgattttgacaaggtcgaattgaaagttgctgaagtcattacggtgcagaaattgaaaggggctgacaaactcctacaattccgtttagatgcaggagatgctgatcatcgccaaatcctttcaggtattgctaagtggtatccagaaccggaagaactgattggcaagaaggttatcatcgttggtaacttaaagccacggaagcttcgtggtgaaatgagccaaggcatgttactgtcagcagaacacgacggtcaggtgcaattaattacggtaccagataatatggtaaacggatcattgatttcgtaaaaactaaatgttgaataaaaaatcgggcgcactgactagtgagctcgatttttgatttgtaattcaattgttattttagttgtttttgacaaatgggttaatctcccgtacagtagtacgaacaagaaatgaggtgagaacatatgaaatatgaacagattctcgtatgcgtctccgtagatggaaaaggacgtttttccgaaaattaattaaatttaggagacttaattaaatgaaaaacgtccaaaaacaagtgccatcattattactgttaatcacattagtgggttttccacaaatcagtgaatcaatttttacgccgatcttgccagcgctcagtcaggcaatgcacgttagcgccagccacagccagctaaccatgagcagttattttgtggcttttgcagttggggtgctcttctgggggcaatatgctgactatcgcgggcgccgtgatgccatgttaggtggattagccttttatttgattggtaacttagggttatatctgagcccgggctttacttggttattggtttgccgcttgatccaagctttcggtgctagtgctggttcggttgtgacacagactatcatgcgtgagagctttacgggtgttactggtgcaaaaatctttgcgaaggtgagtgcggccatggcactatcacccgctctcgggccactcatcggaggtggcgtccagactgtgttcggctatcagcatgtcttctcggtcttgatcatgatagcagtcgtaatactgttgtacgcggggtgttgcttgccagagactcgaccagaaacggtcaaagtggcctcttggcggcaacaaagcgttgtcgtttcacggttattgcacgatcccgtggtctggtgttacggcctattgattagtggtattaatggtattttgtttagttattacgctgaagcgccgtttatttttgaaacgcacttcggctttagtgctgtgcaatacggtagtctcggtttagtcttagccgcggccagtctgctgggcgcgttgctagtgaattggcttgtcaactattggtcaccaatgcaggtcgctttaagtggcttaggattgagtttggtagcggcagttggcttggtgatgaccgctgttggcaatcacgtcattgggatgctgattgggatttttctagccttcttaggtctgaacatcaccctaccaaacgcgttgaatcgtgctttgattggctatgaaacggtgatggggagtgctagtggctggtttagcctgggttattatctgctagtgagtgtgctaacttacttaatgagtttgctccaccacggcagtgtcgtgacattgcccgtatacatgttaggcgtagtcacggtgatgacggtggtgtacgcggggctgtattggcagcgtgtacgtcattgattttgcttgaaagcctgggggaacccgggctttttattttagaattaccgtcttcttttccgaaaacttgcgtcccatggtaaaatcaactaagataacaaaagtcgaaaaggggttattacatgcggatttttgattctcatacccatttaaatagtgaagaattcatccaggaagtgccacgttacttacaacaagcggctgaccttgatgttacgcggatggcaatcgttggttcgaatacacaactgaacgccgatgcgattaaactggcggaaacgtatcctcagttggtcgcgattgttggttggcacccggaagatgccaaaaactatgatcaggcggctgaaaagttgttgattgaacaagtccaacatccgaaagtcgtcgcgttaggtgagattggactggactaccattgggatacgtcgccacaagacgttcagcggcaagtctttgcccgccaagtcgccattgctaaagagatgcaattgccaatttccgtgcacaatcgtgatgctttcgaagatacctataagatcttgaaagcagctgatattcgtgacacgggtggcgtcatgcatagctttaatggtgaccctgagtggctcaaacggttcttggacttaggcatgcatatttcctatagtggtgtcgcatcatttaagaatgcgcgtgaagtccatgaatccgtcaagcaaacgccactaacgcaaatgctggttgaaacggatgccccttatctaacgccggaaccataccggggaaagcagaacgaacccggttacacgcggtacgttgttgaagcaattgcccagttacgtgaaacgacgccggaaattatagcggcccaaacttatcaaaatgcagaggaattttttaagattgaaaaagattaaagaagtaattgtggttgaagggaaagatgacacgaagcgtctcgccctagctgtcgatgcagatacacttgaaacgaatggctcggcgatttccgaagccaccttagcccagatcaaaacgttgcaggccagtcgcggcgtgatcgtgttcaccgacccagacttttccggtgaacgtattcggaagacgatttcggcggctgttccgggtgtcaagcacgcctttttgccccgcaaagctggtgtaccaactaaggctggggggagcctgggcgttgaacacgcgagcccagcggcgatccaaactgcactcgcccatctatatacggagcaaatcgacgagccccaacagttgatcagtcaccatgatttgattgcggcgggcttactagctggtcccacggcgcgtcaacgacgcgaacagttgggtgaacgtttaggtatcggatacgtcaacggtaaacagctgcccaaacggttacaactatttcaaattcagccagctgatttttgggcggctgttgaccaactaaccacagaggagaaatgatgagtagagatttagatattgcgaatcccgcccgcacacgggcaattatgcatacgtacgggttacaagttaagaagagtttaggacagaattttttaactgatcagaacgtgttacacaacattgttgccactgctgacattggaaccaatgataacgtgattgaaattggccctgggatcggggcactgactgagtatttggcacgggctgcgcaccacgtcctggcctttgaaatcgatgatcggttactgccaattttggatgagacactagctgattatgacaatgtaacggtcgttaaccaagatattttgaaggccgacttagccgcgatgatcagtgaacatttagataacgagcggccgttgaagctcgtcgccaatttaccgtattatattacaacgcctattctgatgaacattttggcgggggacgttgcttttgaaaatattgttgtgatgatgcaaaaggaagttgccgaccgtttggcagctgaaccgggtacgaaggcgtacggtgcgttaacgattgctgtgcagtaccggatggctgctgagatggcgatggtcgttccccggacggttttcgtgccgtcaccgaatgtcgattctgcaatcgtgaaattgacggcattgccaccgcggacacacgtgccatttgacgaagcagcttttttcaaggtcgttaaagcgggctttgcgcaccgccggaaaaatctgtggaataatttgcaaagcctatttggtaaacaacctgagacgaagacggccattcaacaggctcttgatatcgcgacgattgatcccaagattcgtgccgaacggttgacggtcgatgaatttattacattgacggatgcgttacatcaggctgacttactttaagttatctatgcttataaaatggttgcacattagaaaaccttgtgatataatattgacttttttgtgaaaagctagtatagtgtctttcatgaggaggattctcaatgccaatttcactagctgcaattaaagataaacttgactcacggatcggccaacgcatgaaggtcgttgcccaggctggccgtaagaaaacaactgaacgccacggtatcttgaaagaaacttatcgttcggtgttcgttgtggatttagatcaacaagaaaacgcatttgaacgggtctcctacagttatactgatgttctgacaaagaacgttcaaatcgcttttgatgatgaaacaactgaagcttaattcgcgtctcgtgaattctcaatattaagacccccaagcaaggtctttttattttgccttgatattagtataattgtatcaaagtaagtcagcgaccccgggtaatcgcggtcatggaagagggtgagacgcgtgcagatcgttgaaaaagcaccggccaaaatcaatttaggactggataccttatttgaacatccaagtggggataaagagtgggacatggtgatgacgtcggtcgatctggccgactatgtcatggtagaatcattgcatacgaaccgaatcgaagtggtcaccgatagtggctttttgccgaatgatcgccgtaacttagcttttcaagcggtgagcgttttaaaacggtattgtcatgttgatcggggtgtccgtatcaaaataagaaaggccattccggtagcggctggtctaggaggcggctcatctgatgccgccgctgttttacggggcttgaaccggatgtggaatctccacttggacttagccacgttagcacgtttgggattgcaagtagattcagatgtgccatactgtgtctacagtcagacggcccacgtgacgggaaaaggcgatgtagtcaccccgctacctaagttgccgccgatgtggattattctagcgaagccgaaagtcagtgtgtcaacgccaaatattttgcggcaggtcaattacgagcgcatcgaccagcatcccaatattgaggccttgttggctggtattcaacagcaggatttcgcggagatttttgcgaatatgggcaacgttttagagccaatcacggcaaaacgctaccccgagattttacagatcaagcggcaattgttaacgtttggggcggatgcggcccagatgagcggcaccggaccaactgtgttcggtgtgtgtcgcaaacaatcgcgggcgcaacgcgtgtataattccttgaagggtttttgtcgggaagtataccttgtgcggccggttaatttaaatgaacattagaccgcagtagtccgccgtgatggtgggctttttttattggtacgggcttaggtgagccgagtctctaatttactgctacgcttaaacggtagcgctgagccatttgtcatcacgacctgtgtccagccagagatggtgtagcagtgcaattggcaccggaatgcgagtagccgcggctttgcttgcaggttgacacccgaagatggtcgttgccttcaacgcatcataggttattcggacaacgcaatctctttttgtaagcaatttatgcgcgtttatgattaaataaggagtaacggaggtgttcggatgaagcagtcgacaaaatttggattgaaattggcgggcgtcattggtgctgcaacttatgcgggaacgttacttggtggcttagcggcgtatcaagtcgcgatgcacgtgagtgacgcacagaagcagcagggccgcgaacgttcgcgggcagaaaacactgaaattgagaatttttggtatttcaagcagcctaaacagcagtggatgatccagtcctttgatgggctgaacttagtggcaacatatatccctaatccgaaaacaattggccgcttggcgattttggcgcatggtctaggacattcgcgcgaacaaatgattccgtatgcgcgcatctttatgagcttggggtatgacgttttaatgcctgatgcccggtcatttggtgatagtcaaggccatacgattggttatggttggctagaccgactagattatgaacgttggattacgatggcgcttagtcaattaggtctggatattgacatcgtattgatgggaatttcgatgggggccgccacggtcatggcgactagtggtgagccgttaccggagaatgttaaagctattgtggaggatagcggttatgcggatctttatgatgaagcgaagttcagactgactcataagttccacttgccagcctatccgattatgccggtggcgaatcgcttagcacacgttcgcgcgggctatgggtttaaggatggccggattctgcaacgggtgattgatggcgggttaccgatcttgatgattcatggttccaaggatcagacggtgcctgttcgcaatgcacataccttgtacgaccagttgccacaacaaaagggcctgtatatcgaccccgatgctggtcacgttgaagccatccgaacgcacccggatcgctatcaagaagtgttggatgaattcttacatgagcaggcggggttggcttaagcccccttaaattaaagtaatgataaacatgaattgaccgtgttttaccggcttaacggtaaaaacggtcttttttttgcaatctcgtcttagtgacaagcgcattcaactagtggtcaaggtgttatttgattaggcccccgatgattgccatggctggtaatgattgcggcattttgagctcaggtattgacaaatcaccgcattcaggtaaactaaaatagtaatcattacgatttactttaatttagaaagttggggtagtgttatgacggaaccgttaattgccgtccaacaccttggaattggctttccaaacaaccaggtgtttaaagatttgaattttaacattgaacaaggtgactttttgaccgtgattggtgaaaatggggtggggaagaccactttaattcgcgccttgcttggcatgctgaagccaacagccggtcaaattaagtattatccgaataaaaaagccattaaaattggctatgtgccccaatttcgcaacttagaccaggagtatccgttaacgattgaggactttgtcgggctgaacctaaaagggtggcagccgtggctgtctcgagctgaacatcgtcaggtagcgacagcattagccgtgaccaatttgaagaaactccgtcagcgaccgcttgggatggcttctggtggtgaaaagcagcgggcttacttagcacaagcaattgtgcaacaaccgcagctattaattttagacgaatcgacggctagtctagacaatgaaatgaagtatgaattgttggacctcgttcagaacttaaaccaaactagcaacattaccgtcttctttgtgacgcacgacttgccattagcgaagcaatacgccaaacattatctggccttaaagcccggccaccagcaatttggcaatatcgctgatatgtcggtagagcaattaaaggaggccactaatgtcaatgtttagcttagtatttatgcgaaacgcctacttagcaggaacctttattgcaattatttgtgggacgattggcgttttcgtgattgcccggaacctctcatttctgacacacacactgtctgaaattgggtttgccggtgcagccttcgggatttttatgggctggaccgcgttgagtgggatgctgatttttaccgtgattagttcggtcatcgtggggcagatgagtgtgaaacaatcacgacgcgaagcctcgatttctgcaatttccgctctgtttatcggcttaggaattctattcctgtcgttatctaatcaaacttcgagttatgcgacgagcatcctgtttgggagtgtgattgggattgccagtgcggatgtcatccgggtcgcaatcttatcggccatcgtcctactcgtgatgttgggcttgtaccggccactcaaatttgattccttcgatgcgattggcgcccgggtgagcggcttatggacgaccggcatctcagtggtcttcttggtactcgttgcgatgagcgtcagcgtggctgcccaaattgtggggtcattactgatttttatcttactcacgttaccagcagcggcagcgcgatactttgtccatacggttagcaagatgatttttctagcgattggtttcgcgttgattggggtttggctggggctgtacttgagttacgtcacgaatttaccagtcagtttcttcatcgctgcaatcgagtgtatcttctactttgccgcgctgggttatcagcgacttcgggtcggaagctagtggagctattcttgttcagctgtatcacgttaaaagtaggtagtttacagaattaagtggttcgttgtgacacgctaaaatgttactagtcgtttctggaattcattgggaattctagagcggctagttttttgttcgtgttggggttgcaacttttcgtttgcgtggggggcaagtcacacaagaagtcttctaaaagcataagtccaagggtagcgctgtaattgccacacttagtcgtaggacgggaatcagtaaaggtatcatttcgtttttgacggatatgattgggtataatgatatttataccattattacggggaaagatgcgctactggtaagaagcgttctcgtttgaagggtgcgttttggacagccttgaactttgtgccggtcgggcaactaagcaggcaatgaagcgtgcggctgaggaattggccaaacgtaagccggctaggaagacgaccaagaaagcagccacgaagtctcacaaaactacaaagaccaagcatgggacatcaaaagtctaagcccaaaaagacttctcatgcgacaaaacacaagaccaagaagcacaacagaagcgctacaataagaaaaaagctgcgggcaaggcaagaaaagcttctcagagaaaacaatcctcgcagaataaagatagtcatgggaaaaaggagaaatctagcaaggagaaatcttcaaaagatgggaaagataaaaagacaaataatgtcccattggaaaatggctcttatattaggaacggaaaaccttatggacgaccaacattaaccgggaagaaaaaactcgaattcgagcgggaagtatataataggcaagctaaagatggagtgcttattgatcgaaatacgaaacaagtgatacattggaagccgggttaaccccgaaaaggaaaggtcgatttcggacatctaccgggtaagtcttataaggaaatgttcaatctatataaaaataggaagatgacattgaaggattttcaatttaatcccaaaaactctagattagaaactccgtctgctaatcggagtcataaatatgaaacgaggtaaaaagtgtgctagtttacaatgcttttagtgcggtaagagatggaacatttgatcagtttaaaaattattattctggcaatgtggatgagactgataagtttgaaggacttaatttattatgcatggcaatgacaaacgatgacaatcctgaggaaaagttaaagattgttcattttttgttacaagcaggtattgatgttaactttgtcaccaagagtgaacatcgaaacgcattacattatttttacaattgtgtatggcgtccaaatcctaagtttgctatggaaattacgaaactattagtcgagaacggcatcgatgtaaatagcgttgataagtatggacatgtaccactgttttatgcggtttttgataatgatttggatactaaggaaaatgaagagttatatttttatctattaaaggcgggctcagattatcgtttgcgtgatccatttgggaaatccattatagattatgcacgagaaaccaacgagaggactggttttttagatattgtaaaagagtatgaaaacggcaaaaaatgattgcaggttgaaaaatggcaacgattataattattggagtagtaattataggaattacgctgggattaggatactggagttatttactgggaaaaaggaatcaatctaattttgttggccctattattccagtagcttactttgctgttcgagcaatcttagctgtgatgacacaaactacgacacatgggctagtatcgtcattactcggtagcttgttattcagtttgatttactatggcttatttgttgggggtaagcaccgggccaataagtaacatgaattagtcagattaagataaccgatattcgacaaggactaattgccgagtatcggttattttatagaaaagtttagtcggtaatttggtaattactgttgtctatatcctattgtttggggacgacaacgattcaataagcagaagccaataaaataaattgcttgaaagctcagaacgattccaaaattactcgttctgggctttttaggtgtaagtagcgaccaatcaatcgaactttctggacgctacgtcgtgtgaacgatggattcccctggcacattccgtatctactccgttataagttgcctaagtttattgttctcgaattcgccaaatatgagctgtacagacaagataattggcaaacatattaagaaattccgatggtttagtaaaaaaacgtgaaaaaattagcttatttccgaacgtttgtgttatcattttgcatagactttaaaaatgatgatttaggttgaggtggaagttatgaaagtacgtagaagcgaacgtttaatagatatgacgcgctatttgttggaacgtccccatacattagtttcattgacatacttcgcggaacggtacgcatccgcaaagtcgtcaatcagtgaagatttaacgattttgaagaaagtgtttcaggcccggggaacaggaatcttggaaaccattcccggtgctgctggtggtgcacggtttattccttatattttaaaggaagaggcccaagaatttattgacgagatgaccactaaggttgccgacaagagtcgggtgttaccgggtggctatgtttatttatctgatattttaggccaaccagatattttgcgccaagtgggtcgggtgattgcgactcagtacttgaatcaaaaaatcgacgctgttatgaccgttgcaactaaaggaattccgattgcccaaagtgttgcgacttatttaaatgtgccgtttgtgattgtccgcaatgattctaaaattacggaaggctcgaccgttagtgtgaactatgtctcgggttcttcagaacggatcaagaagatggaactttctaagcgaagcctaacggaaggcgccaacgtgctcatcgtggatgatttcatgaagggcggcggcacaatcaacgggatgaagaccttgattgaagaatttgatgctaatttaattggcatcaccgtttttgccgaagccagttttgttggcaatcgtttaatcgatgactacacgtcgttattacgggtaaccaacgtaagtgatagtgacaaggcgattaaagtcgttgctggtaactatttggagaaggttttcggtgcggaagtctagcctggtgtgttatccagaccagttttttgatatgatggacttatctgaggactaaggagtaatttgtaatgacaaccaaaaatgcaatcatcatggccgctggtaaagggacccggatgaaatccaagctagtcaaagtattacatcaggtctgtggcaaatcgatggtcgaccacgtcttgacccaagttgaagccacccacatggcaaatatcgtgaccattgtaggccacggtgccaaagatgtggaagcagcattaggcgaccgaactgagtacgcggttcaaacggaacaattaggaaccggtcacgcagtattacaagccgaatcgctcttaaaagatgcggatgggatgacgctgatcgtcagtggcgacacacccttatttaaagctgaaacttttgaagaattatttgaatatcatcaagctaagggtgccgctggcacgattttaacgtccaaggcacctaatcctcaaggctacggccgggttgttcgcaatcggttaggcatcgttgaaaagattgtagaacaaaaggatgcgactaaggaagaacaagaaattcatgaaattaacacgggagtctactgcttcgataatcagaagttgtttgccgccttacatgaagtgaccaacgataatgcacagggcgaatattatttgactgacgtgattcagatcatgaagaatcagggtgatgtggtcgccgcctatcaaatggatgattttgatgaatcaatgggggtaaatacccgtgcagctctagcccaagcaaccaaagtgatgcaacaacggatcaacgcgcagcatatggaaaatggggtttcaattatcaaccctgacgatacctatattgatgcgggcgttaagattggtgctgatacgattattgaaccaggcgtcttgatcaagggccatacgacaattggtgaagattgcttcatcggcgcgcactccgagatccatgacatggtgattgaagatcgtgttcgggtgacggcttccttcttggaagattccatcatgcacgctgacagcaatattggcccgtatagccatttgcggccgcaagctgagattggtgaacacgtccatcttggtaactttgtcgaagtcaagaaggctaagatcggtaatcggaccaaggtcggccatttgacttatgttggtgacgcaacgttaggtcaagatattaacgttggttgtggtgtggtcttcgttaactatgacggagtcaacaagcaccacacgaatgtcggcgattccgcctttattggtagtaactcgaacatcattgcgccagttgaagtggctgaccactcgtttatcgcggctggttcgaccattactgatgatgttaacttccatgatatggcaattgcccgggcacgtcagacgaacaagcctgacttctggggccgcttaccacatgaaccagaaaacatgtaattattatcattgataattgaattcagagaccatccaagtgcgttgttgctgggatggtctctttttgttagctcatcggcgtgacttgtggtgtaataagggctatttagctgctaaataggacaaagttgatttgactgtgtcagttcagggcaactgagtgattttaattaagtcacgaaattggtataattggcgaggagtttacgggacggggaagtttggaggcatttagatgcagacgaagaagtggattcgcggccttgtttgtggtctggcattgcttggcggttggagctgggcattaccagtacacgcaactagcgttaaaagtgagcaaacagccgttaaaaaaatcgcgcaacgtgatttgaaatcactaggtgggcgctggtcggtcaaggtgacccgattaggtcgacgaaaactaaccgtgcaaacgggaaatcagcgcatgactcgtcaacgttctgctagtacgatcaaagtttatgttatgctgacgatttatcgacgggtccaacaacgaaagttacggctaacacagcaagatcaaaatgatttaaaattaatgattcataattccgataataacgcggctaaccggttgatcaaacgtgcggggggcttcaggggcgttaatgcggccattaagcattatcgattcaagcagacggttttacaacggtatatgcttgatacgaacgcgctacgctggggacgcgataattacacgtcggtggctgatctaactcgttttttaacgctgacatatcaacataagttattaggtaagacgtatgataagaagatgttgaccttacttaagggctgtcgcaaccacagcaagctaccatacttagttaaacacgccacggtctataataaaactggcgaatatcccgataagggtgtccaaaacgacgcggccatttttaagaccaaacaaggcacttatagcattgtcgtcatggcccagaatggcaagcagtaccaacaatatcaagggatgaatcgtttggggcgcgatgtcgtgacttatttaaatcagcaccactgagtgtgtttagataactgaacagtttagtagatccctgttcgtcagccggtgtgcgctctattccgacttctaggactggttacttttgaacgcgagaaacggcagcggtcaagtaccaactaaggcaataactggtacaatgcgtgtgtcagtaccaattacaactgatagcggtctcattaactaagattgttcggtaatcggggctcacgaaactttaatctttaatcacgaagaggcttagattgccgaaagtcgtgcttccagcccagtctcacgcaattttgccttgttgttgggacttgattttcactagcaaaatgcctattatttagtaagtaataaattttcgaatggaggaaattatgtcagaacagtattttgatccaaagttaaaaatctttgctttgaattcaaataaaccattggcagaaaaaatcgcggacgccgttggggttaagttgggtaagacttcggtcgatcgctttagtgatggcgaaattcgcattaacattgaggaaagtattcgtggtgaccaagtttatatcattcaatcaacttccgctcccgttaatgacaatttgatggaactattgatcatgattgacgccctacgtcgcgcgagtgctaagaccattaacgtggttattccttattacggatatgcgcgtcaagatcggaaagcacgttctcgcgaaccaattaccgctaagttagttgcaaatatgctggaaacagccggtgcaacacggattttggcactcgatcttcatgctgcccaaattcaaggcttcttcgatattccgttggatcacttgatgggtgcgccgctgttagctgactacttcctgaaccaccacttggatgaaaatgctgtggttgtttcacctgaccatggtggtgtgactcgggcacgtaaattagctgaattcttgaaggcaccaatcgcgattattgataagcgtcgaccacgggccaacgttgccgaagttatgaatattatcggtgatgtcaagggtaagcgggccatcatgatcgatgatatgatcgatacggctgggacgattactttaggtgcacaggcactggttgatgcgggcgcaactgaagtttacgccagttgtacgcatccagttctgtctggtcctgccatcgaacggattgaaaagtcaccaattaagaaattagttgtgacggattcaattgaattaccagctgctaagcgaatcgataagatcgaacaagtttcagttggtcaattaatgggtcaagcaatcaagtttatccatgaaaataaaccagttagtccattatttaagaatcgtttccataacgaagaaaattaattgacgaagcgtcaaattggcaattgctgatttgacgctttttaagttgcagtaatttctaaaagtgatagagtaaaggtgttgtttggtgggcattgtgacctagtcaaagttggactggacgctgtatatcaacgaatctttcgttttggcgtgcttcaacattaattaggtgatggcgcggaacggataacggaccaacgtcgggctaccggcgtcctttttttatccataaacactagcacgaatccttaaaatgattacaatataagttaagggggtgttgcgatgacaccgttttattggggtagtttggcccttgctagtgcgttgaccttgcaattgacggaccggcggcattggttaacgggacatctttttttgattgcagtcattggcattttgttaagcgcttaccatcgattcagtgcgcaggcaagtcctacttggcaattcatgttggtcggtgcaaaaatcttggcttatacgttgttgccaattgtaattttgattgtgggcattagttttgtcaggtatagttaccgattgattcgcaaggagggctgggcgtttcattacagcttgctagcaatcgtcggtggtgtattagtcataatgctggtcttatcagtaatcaacttaggagtttggcattcgcgacgcttgtggcagttattaggcctagcgttattattgacggcgtattttgcgttcagctttatcgcgtatctattagcttgcgtcatgacccgactaggacgtcatcgacagatcgattatatgatcgtcttaggagcagggttgatgccaaatgggcagccaacgcgaacactggcatatcggcttcagacggcagcgaagtactaccgggtgcaacgggcgcgttatcatcaaccaatcacgatcgttgtttctggtggtcaggggccggatgaggttatggcggagagtaccgcaatgcggcagtacttagtggatcaaggggtcccccgtgatgccattcaagaagaaaatcggtcaacgtcgacaattgaaaatctaaaattttcgcacgcattaattgtgcggcaacaaccgttttatcgcgccgtgattgtcacgagtggctatcacgttttacgggctaatatttttgctcggcaactgcacctgaacctaacgggaatcggggcgcatacgccactgtattatttaccgtttgctatgtttcgggaatacttggccttaattgtgatgtatcgctgggccaacttagtggtggtacttggtttagcggcttattatgtcgcagcgttagttaggttaatttaacaaagccgctactcagagctttgaaaaaaatgacattgcgattaatggtataatggagaatgataaaaaggaggggtttgccgtggatcatgcctatcgatcatcttggccactgtttgtaatcgtcctgattggattgattacactttcaggctgtgccaaaaataccggaggcgtaaccgcaagttcggcaacgaccgcaactggtaacagtacaacggccgttttaaccaaagctgatcagcaaatttcgcaacaaaaaattgccgctgcccagaagactttagcgggtgcttctgaatcaactccagcgatcaaaaagttagcccttgggttaaagtattatcaggaagctgaagaagcacttgataataatcagctcagtctagcaaagggttattttgacacgttaagtagttatgatggcacgactgacgccagttttattgctgctcggcaaaagctcgtcaagcagtaccaggcggtcaagctagccaatggttactataacgctgcccgtgatgaattaagtattcatgatttggccactgcgaaggccaatattgataagttggacgatgtgcaagccacacatccggttatcaaaaaattacagaaaaaagctttggcaatgaaacaagccattatgaattatgaggcgtcgcaatcaactagttctggtagtgatagctcaacggttgtcagttcgagttctgcggctagtgcgagtgatagtaggacgtcttcaagcagtacgagtagtactagtgccgatagttcaacgatgacaagttcgtcgaatagcagcacgtctgccagcagtagttcttcagagctgacaacttcggcgatcatcaaacagtttcaggatgcgtccggtgttacgtttacttcggataccgaatttaatattactaaggagaccagtgcttattatcagattaccgcaatctatgcgacgaatgagtctagttcttctgcttccaagacagtaacggatacttatcgttattatccggatagtggtagtgttactaaggaaaatagtgcaactggtagtttcgaataaccagcattaaaaagtgacgatcaggtaatgactgatcgtcacttttttgcttgactggattgtttagaaaacgctgggtagcggtcataacagtgataaaaaagcaacgctcacgcacgttaaaaacgagccattagcgttgcttgaattagtttgaaaaatagtagcttaggcgagtgcccaagtgttaatggcgtgtgcgaccccgtcttcaacgttagtcttggtttcataacgggcaatttgcttggcctcatcaatggcgttacccatcgcaacactgttggttgcgtaacgcagcatactcaaatcgttaccttgatcaccaatcgccatgacttcatcagcagttaagttcagatggtcggtcaacgtggctagggcgttacccttgctagcggcgggattcatgaattctaggaaatacgcttctgagcgaacaatggtaaagcgcttggagaatgacgctggtaattgcttgatggctgcatccagtagtgggccgtgatcgatgaacatgcacttgacgattggtaagtctgggcgcatttcttccggtgtccggaaccgaatcggcatattgacgagtgcactttcgccgaccgtataagggctgatatttcgattggcggtgtagatatggtcttcactttcaacgtgacaatggatattgagtcttcggctgagcgtttcaatgtcgatgtaatcgtcatgtgacagggtaagtcctgtgatgatcttaccggtaattgtctgaaccattgagccattaaaagtaatgacgtaattatcttcaccagcgattccaagttgctttaaaaagggcgtgacgccacttaatggccgtcccgtacaaatgacgactttgattccttgcgcgttagcggcgttaatcgcttgaacggttgcgggatttagttcgctgtgctcattgagtaaggtgccgtccatatcgatggcgataagcttgactgacataataataattcctccaaaattagtgtggtacgaccagacgatcgtttaaaatatattgctggaattcttggtaaattggtttaaataaatcgttttcggcgtttttgctgagcatttcttttggaaagaaaaaccgctgatcgccagagactttcccggtgatggctcgcactaggtcactgacggtggatagttctagtaaggaaccgtctttttgttgcagttcaatctgggtacgcggcttcttcatcttaggatcataggcgtcgtaaggaagatcgtaactgtcgttgatgtcagtgtagtagtgcgtatcaaagccggcttgttcaattaatttttgtaacgttggaattagcggttgagtcgttgcatcgactcgtgctgattttaagggacgccggtctaagaaacgggttgctaggtcagcgagaatttgatcacggctatcacgccaatggctaaaataagtgtttaagacgccatcgtctaaccgtaaataatcgtgtaacgtaaagttattattgaaaaacggcaataacatcactggtgtggcttcagcgtcgaccgcgtggctttgataaagatcgttagcccgttccagtaggcgatctaggatgacttccatggaacgtgatactggatggaaatagacttgcatgtacatctggaagcgactgacaatgtaatcttcgaccgcgtgcatgccttccattgcaaatgtaatgccgccttgatacggcttcataacgcgcaaaatacgggtcaaatcaaaattgccgtaattcgtacccgtgaagtacgaatctcgcagtaggtagtccatccgatcggcatcgatttgactagaaatcatctggacgacttggggattcgggtacgttttttgaatgacggccgcaacttgggccgggaagtcaggtgagacttgctgtaagacctgattgacctcggtttcaggtgatgtcaaaatctgaacagttagggcttcatggtcggtgtgaaagatgtgctcgaatgtgtgtgagtatggcccgtgaccgatatcgtgtaacagggcggcgcatagtgcgaccaatcgctcgtgatcatcccaaccaccgtcaccaggggcctgggtcgggtagttacgttcgaagttatcgcaaatacggcgtgtaatctcataaacaccgaggcaatgtccaaagcgggagtgttctgcaccgtggaaggtcagcgaggtcgtaccgagttgcttaatacggcgcagtcgttgaaattccgaggtgttgatcaaatcgagaatgacttgatgttggatataaatgtaatcatggaccgggtcacgaaagactttctccatgggtaatagttgctggcgatagaccaaattaattccttctttcagtgatgcaagcgttgttgtcggcgttgcatttgttgataggcttgatttaagtgtgcttgaaattcaggttcttcggtgactaacggcaaacttgttgtgtcgaccgtcccatgttgagctaggatggctataaaacgagcttgtgtagcggtagtgtcagtcggcgctgccaaagcgtcagcaacggtcgtcatgacttgtggatcaacatctggaaaccgcgcgtcatggtgaccggctaagctgacttggtaaaaacgctgaatgagttgactacgggccatctgatcgccatcaacgctgacatacagcatgatgaccagcgcttcggcagtgcgccgttgcgacattccagcaattttacgaccggcaatactcaaatcataatcaccaggacaataggagcgtgtaatctcaccagtcgtgatatttaattgtggccaaactgcctgaacgtagtcgaccatcaattgatatgccgctgtaattgaatagcgttcacgagttgctggaagaaataaggagacgtttagtacaccagggtcagcaactacggctagcccacctgaattacggagcatgacctgataaccggcagcgtgtagatgtgctaagccagcagttagccgtggcaagcgttggtctaataggccgagaatgacggttggctgtaactgccagaaatgaacgattggttgctgacgagccgccgttaaccacagcagggcgttcgtgtacgcaaaactatccagcatcgctgccggttcgtatttttgactcaaagttgcaattgtcgattccgtcaagaaagccaccccgttatccgttgttatcgggcacgagggatgtctcatgatgaaaccgccaccgttgtccgtatcatcactaattatactagaaaaatggtaccgttgcattggcttagacaaatcaacttaatctgtagcataccatcataggataatgaaacgtgcaagttagttggctttttgttcgtcagcaacgtgcggcctattttgacctccggggctgagggacaattgttggaacacagccgactcaaaaagtttacgcgggttcgaacttttcccagcagatctaagctgaccgcttttagtcctatttttagttattttggcatgaatggcttataattaaacaggaagttttacgatgggcgtgatgggagtcgcgcggtcgtgaacgctgaaaaggatatagcgagtgtggtaacacggtgatcgtagacgggcgttcagcgtgtgattttgaaatattaggaggtccaaatatggatgatttaacaactggtgtgccagtggcgattcatttagagacgcaggcacggcaagatgacgatacggcgaactatgcactggatgtcgatggtcaattggttcagatgggtgacgcgttttatttacggtataaggaagttaacgatgatgcgccagaaccgattccagtgacgattaagctggcagctaatggggacgtcgtgttgacgcggagtgcggagaaccgacttcggttgcacttttccaatggtaaacgggtgcgtgctcattatcaaacgcctatggggatgctacctgttgaaacggtgacgccgatgttacgagtacggctacgtgaacggccattttcaggtgaggtgaacgttgattacgatttatacgcgggtgagcagctacttggtaactacaagttgcgattgcaattcacggcctaatttggtattatgtactataaactgtggaaaggacgtgcaccagtttggaactaaaacaatttgatggacaaaaaaagtccgaattatctttaatcgaggttgctcacgcgatcttatcacaacatggtgatgtgatggcttttgccgacttgaccaacgctgtgcaatcatatttaggtaaaagcgacgaagaaattcgggagcgtttatcacaattttataccgatcttaatatcgatggtagtttcatttcgctcggtgacaatatgtggggcctgcgtgcatggtacccatttgaatccattgacgaagccgttattcatacggacgatgacgaagatgaggatcggccaaagcgcaagaagcgtaagaaggttaacgccttcttggccgatgccggggatgatgacgacgtgatcgattacgatgacgatgatcccgaagatgacgataactacgatgacgatgatgatcaggacgacgatactgatgattcagcaagcagcaagtacgatgaacttgcgggtgttgatgacacagacgacgatgttgctgatgaaacgttgccagacggtatcgagggtcaattatcagagttaaatgatgacgatgatgatgacgactacgatgacgaagacgacgaatcgaaataagcttttcaagatttttccttgacgaaaagggaatctccttgtattatcttatttgggctctctggtagaaatacctgagacaaacgatcgtattagctccctatttctgctgaaatagggagctttctttatttataccaccccacgaaataaatctttaaggagttatcacatgaccaaatatatttttgtaactggtggcgttgtgtcatccattggtaaaggtatcgtcgctgcttcgctagggcgtttattgaagaaccggggcttaaaggtcacgattcaaaagtttgatccctatatcaacgttgatcctggtacgatgagtccttatcaacacggtgaagtcttcgtgaccgatgatgggaccgaaactgacttagaccttggacattatgaacggtttatcgacattaaccttaataaatattcaaatgttaccaccggtaagatttattcagaagttctgcaaaaggaacggcggggcgattatttaggcgccacggtgcaagtgattccgcatatcacgaacgctatcaaggaaaaaatcatgcgtgcgggtacgacgacggattccgatatcgtgattactgaaatcggtggaacggtcggtgatatcgaatccttgccatttattgaagcgctacggcaaatgaagagcgatttaggttccgacaatgtcttctacatccataccacgttgatcccatatttacgggcagctggtgaaatgaagacgaagccaacgcaacattctgttaaggaattgcggagttatgggattcagccgaacatgttagttgtccggactgaacaaccaattacgcgggaaatgcggaataagattgcgtccttctgtgacgtggaaccagaagcagtcattgaatccttagacgttaagacgatttattcaattccgttgaatgttcagaaacaaaacatggaccaaatcgtccttgaccattttgatgtacaggcacctaaggccgacatgagtgaatggattgacttagaacatcatgtccagaacttatcacggaccatcaagattgcgctagtcgggaaatacgtcgctttacaggatgcttatatctcagtgacggaagcattgaagcatgctggctatacggatgatgccgacattgatttgaagaagatttctgctgaagatgttacgccagaaaatgtcgaagaactactcggcgatgctgacggaatcttagttcctggtggctttggtgatcggggaattgaaggtaagattacggctatcaagtatgcccgtgaaaacgacgtgccattcttaggcatctgcttgggaatgcaaatggccagtgtcgaatttgcacgtaacgtacttggattgaaggatgctaactctgctgaaatcgatccgaagacgccggacaatattattgatttgatggccgaccaagaagacgttgaagacatgggtggaacgcaacgtttaggcgcttacccttgcaagctgaagccgggaactgtggcggctaaagcctaccacaatgaagaagttgtgatggaacgtcatcgccaccgttatgaattcaataataagtatcgtgaagcaatggctgctaagggcatggtcttctccggaacttcgcctgacaaccggctcgtcgaagtgattgaattaccaaagaagcgcttcttcgtggcctcacaatatcatccagaattcttatcacggcctaaccgtccagaagggttattcaaggcattcatcgatgccgctaaccagactggtaaagtgaaggcataaatttagtacggtagaattaagaataaagcacgccagcgaattgttggtgtgctttttttgttgggcggccacgggcttgattaggtcaccgatattcacagtgacaactggtgttgcgaaaatacatggtaacaataaatggttctcttgataatagaaaaataaaatgataataaaaaactattgacaataaatggcgggaggtctagattataagtgtaaattgaaagcgcaaacataatgggttagtagttaatctgattatttagaaagccaacggttgctgaaagttggttgattggactgatgaatccgccatttagcgtttgacttcatttttaagaggtcgcggtgagacgatatactcgtagagcagtaaattgggtggtaccacgttgataaaaaacgtcccatagtcttttaggtgaagactatggggcgttttaattttaaggaggcttttcgtatgttaaatccaaagtttgttcgtaataacccagaacttgttaagactaagctccagactcggaaggttgatccggctgaggttgatgaatacttacagttagaccaacaaaaccgggatgcaattaccaaggttgaaggattgaagaaacagaaaaaccagttgacggaacaaattgggcaaagtgatccgcaatcggaagcgggccaagccctcattcaacaagtcaaacagctgaatggtgatattaagagtacggaagcggcccaaacggaagtaaacgatcggcttcattacttagcgattcgcttcccgaatttacctgccgatgatgtaccagtcggtcctgacgaagatagcaatgttgagatgcgtaagcacggcgatattccaacgtttgattttaaacctaaggcgcactgggaattgggcgaaagcttaggaatcttggattttgaccgggcagcaaaagtcgcgggcgcgcgctttgtttattataaggatgcgggtgcactcttagaacgggcggtttacagctttatgctagatctgcacacacaaaagcaagggtaccatgaaattattccgccatacttggtgaacgctcagacaatgtatggaactgggcaatttccgaagttcaaagaagacgtctacacggttgaatcttcaggaatgacgttgatcccgacggctgaagtaccgctgaccaattactatgcgaatgaaatcttatctgaagatcaattgccaacgtacttcacggcgatgacgccttgttatcgctccgaagctgggagtgcggggcgtgatacccggggcttgattcgtatgcaccaatttcacaaagtcgagatggtcaagtactgtaaacctgagaattcatacgatgagctcgaaaaattaacggataatgccgaagaagtgttgcgcgaattagggcttgcataccatgttattaagctttcaacgggggatactggtttctcatcagccaagacctatgatgtggaagtatggatgccagaacaaggcgtttatcgggaaatcagttcatgctctaactgcttggacttccaagcacggcgggcgatgattcgttaccggaaagctgatgggacggtcgattacgtccacacgttgaatggttctggacttgctgttggccggacggtagctgcgattttggaaaattatcaacaagccgatggcacggttaagattcctaaggtgctccaaccttacatgcatggtatgacagagataaaataaaattattatgagaataaattattattcaaataattcatttgaatgttaaacttaatatcactaggattgagatggatacaggctagggctgttatggtaatctcagtcctttttaatttggcgttaaaaatgcttaatttttataatcgaaatcacatgaacggtaattgtcaccatgataatattttatcatgaagaaaaggttttcacggcactaaagtgatgtttatcacaaagtggcgttttacaacgagtcgagacgttaaatctaatgggagggttattcatgcaggttatgttagcacattctctggtgtgaccagaacaacgttataaaaaggagatttaaaaatgacaaatatatttaagggttggagaaaaaatgatactttttggatgctgagtttgttcggaaccgcgattggggccggcgtgctattcttaccgattggagttggcacggcaggtattcttggtatcatcatgatacttattttggctttgccaaccacattttttgctcacaggggcctgagtaggtttgtcttgtcggctaaaaatgatggtgatgacattactgatgttgttgaacaacattttggctttaagattggattgctttttaccattatttatttcttctccatttatccaatcttattagtttattctgtttctattacgaatactgtatcgaaatttattaccgaccaaatgcacatgcaaacaccacctcgttggctgttgtcgctagtgcttgttgggatcctcattggaattgctcgctttggtacctctttgattaccaaagttatgagtggcctggcctttccatttattattgtaatcgttctgttttccttttatcttattccacattggaacggcgcaatcctctcaacattttccagttccgtatctgggggacatttggttggcactttaggaaacttgtggttacttattcctgttatgatcttttcgtttaaccattctccgattatctcttcattttccgttgccgaacgtaaagaatatagtggagaaggtaaggacaaagtcgataaaaagatttcgacaattctattgtcggccgaaacgttgatggtcattgtcgcaatgttctttgttattagttgtacattggcgttgactccagatcaaatccttgaagctaaaaatgaaaatgtttcaatccttgattacgttgcgactgctttcaataatccaattattaaatatgtttctcccgtaattgcctttattgcaattgctaagtcctttttaggacattatctaggaacgagtgaaggcttacgtgggattattcgtaagatggaagaaaaatctaacaagacgctttcaagtcgaactgtttcgacaattgttgatcttgttctgctactaagtgcctggatagttgcctgggtcaatccttccattatgggaatgattgaaaccatcattggaccaatcattgcgtttatcttgttcttgatgccaatgtatgccattcataaaagtcctaagttacagcaatatgccggcaaacacagcaatgtctttgttgtggtaattggattaatcgcagttagtggtatcctgttcaatatcatcaaattgtttatttagtaatctgactaaaatacgagatgaattcacattggttaatattattgaagccaatttttgtcataaatctcgttgctagtgttattgacgagattcgcatgacggtgttggggttcgtgagggtcgcgaatcgaatgaccatactggaggctggattaatcacaacggcggaattaattcagaaatgaaagctttgatgcaacggctttatgttttctgatcagtacaactgtggtgcttgcttgtgccgtaacttcaagattcataaagtttcgaaacgatgtactgacgatgaatgcgcaaagaagcgctagttgcccgtaccaaagcttaatttaacgtgatgattcaaataggaggatgactaaaatgacggtgaattacaagagtgtttttgatattattggcccgattatgattggaccttccagttcccatactgcgggggcgtgtgcgattggtcgagcagcgaatagcatttttcaggagaaaccgacagatattgtcattcattactatgaatcatttgcgcaaacccacaagggccacggaacggactatgcgattatcagtggcattcttggttttgatcctgatgatagccgggttccatatgccattggtttggcccgagatcaggggataaatattacctttatcgaagagcctggtgatagcccaatcaaccacccgaacactgccatcattgacttaaaaaatgatgataagcaagtgacggtcgctggatgttcaatcgggggtggaaccatcgaaattcgtgaaatcaagatggatggttttgatgttaaacccaaagggccacttcctatcttgttagttcaaggtggtgagaatgaccatcagcacgtaaccaaacagttggctgatctgactaaagtaaacgaccagcagcagtacaagacggctcggggcaatttatatgaatatgatttggatcgccgcctcaaacaggatgaaatcaaaaaattagcgcagggacacgcaaatttagtttacttataatcagggaggtcagttatgatgtacatgagcgtagcagaactggtaacagcggccaaggagaccaagaagccgatctacgaattaatgattgaacaagagatggaaacatcgcaaacgagtcgtgaagaaatctggcacacgatgggccggaatctagacgtcatggaagcagctgttaataaaggggctgcaggcgacggggtctattcaacaactggtttaactggtggtgaagctgttctcttgaaaaagtatcgtcaaaaagggcacactttatccggcgatacgatgatgcaagctgttcagaacgcaatctcaaccaatgaagttaatgcttcgatgggagtcgtttgtgcgacaccaacggctggatcgacggggacactacctggtgtgattttcacgctgaaggaccgaatgaacctcaaccgtgaccagatgatccaatttctatttaccgctggcgcttttgggatggtcatagctaataatgctgggattgctggtgcgactggcggttgccaagctgaagttggtagcgcttctgcgatgggcgctgcggccgcggttgaagttgctggtgggacgcctgaacaaagtgctgaggctttggcgatggcaatcagtaacttgatgggattagtgtgtgatcccgttgctgggttagttgaactaccgtgtgttaaacggaatgcgattggggtcggtaatgcgttgattgcggctgacatggctttggctggctgcacgaacaagattccagcggatgaagtcattgcagcgatggataaagtcggtaagggcttgccaaaggcacttcgggaaactggactgggtggcttagcggcgacgccaaccggtattcggatgaaggaaaagatttttggacgatcgactaattcacaagttcatgcataaaaaatgtcgcagaaagatgatgagctgactaaaggcggtatcatcttttttaattagatgtttatatcgttacatgtattaacattttatcagtgtgataaaataatattaagtcataacgttgtaaaaaaatagtgaggtgagtgccgttatgcaaaaaccattaacagctgagcaagaatacgtgcgcgagtttattccgtttgttgattttttagcagatatcttaggccccagtagtgaagttgtcctgaacgacttgttggatttaaaccactccgttgtggcaattcgtaattcccacatatcacatcgacaagttggcgatcctgcaactgacttagcgttgcgaacgatgaaggccggtaaaactgaaaagcgtgattatctagccaactacaagggtgtttcgcaagggaagcactcactacgatcatcaacttattttttgcgattagatggtgaaatcgtcgggatgatttgtattaatacggatgatagtgccctagacgatctgcaggaacaagtgttgaaggtaatggcgagttacaaacatttgaactcaccaacgattcatcaactcaaaggaacaccagctaacgagaagacccatgacacgccggtcgctccggaacatctaaccacttctatcactgatttagctcgggaagtgacccaggctgtctgtgctaagtatggcgtctctgttgaatatttaaagcaaaatgaaaaattagaaatcgttcgtagcttataccaccaaggttacttcctattgaaggattcagttagtgaagccgccaaagtgctcaaagtctctgatccgagtgtttatcgttatttgcagaccgtcaaagatgaggatctccagcaggattaaacgatgtaattgtaagcgattaacgtcatgaaaccctttcaaaatttagttcagccatagtggcgaaactgtgaggaagctactctgagttcccggacaggtaagaatcatggtcaccaccgtaaaaatgcggcagccaacacaacaagtttgtgtaagggctgccgcattttaagttttaaactgagcaatcaaatatcccgttgttcagtgatggccggtcgcaattattgtggatgttagtgccagggtagcgtgtgtttttatgggattcgggttggaacgcagccgatttttatgataatttgtttagaatgatattattgaggatgacagcggggattttctatgtcttatcaaaacgggggtattaatgattttattaatttagttatcaactgattatcatcatgataaaactcatgcaattctcattagctgacatcaagctaaaaggctgatgtagcagggggtaattgctattattatcaattatcaaagattatcaaatcgtatcatagaccgttgatcattatattatatggtattatggtgaataataaatggaggtgatgccaatgttgacaccaaacgaaattcgacgtcggttacgacgcgatttggttactattgccgaagcttatcaaattggttttgagagccgtctatacacagaagctgagtatgaaaacttaaagcagacgttattgcagttgcgtgaacttaatatgaacccccaacatatggaacagctacttgcgattaacgggtaacggaatgttactaaattaaataaggaagtgattagtcatgaatgctgatagtccatcaggttcaattcagtccagagagtgctaatgccagtgaaatttatcacgcgcattagcactcttctatttttctagcgggcggtgtgttaataatcatttaggacttgagtaggattaaaataggtcgcttagttgaattattattcggtatcacgtcgctcccaatcatcgtatggagtacatagtatgacagtagtaaaatcggtggacaatcgtggcgttaattacgtgacaatgttaactgttgatgtcagaatgaattgtacagcatcgcacgtcttggtggcaccttaaattacgcagatttagcttaattatcttacaaaatcgttcataaaagcgtttgaattagtcgagttaatgattttattgcgtaaaaagattacagtttcctgatattggttgtatttttgacggacattctttattatggttaatgattgtatgatacagtgtgacacttatttagcgaggaaagttatgttatgaaaaaaatgataatccatggcggaaaacgactttctggggaattaacgatcggtggcgcaaaaaatagtaccgtcgcactgattcctgctgcgattcttgcagacactccggtccaattcgatacggttccgcacatcttagacgttcacaacttacggctcatcttagagtcgatgaacgtccattccacttttgaaaacgatgttctaacaattgatccaacaaatattgaagaatctgaattaccaagtcatgccattaaaagcttgcgggcttcttactactttatgggggccttactcggtcgctttaaccgtgcaacggtgactttccctggtggtgataatattggtccacgaccaattgatcagcatatcaagggttttaaggcgctcggcgctaacgtcgttgaagagaatgactctgtctttatctcaacgggcacagagggccttcacggagcgcgcatctttttagacgtggtttccgttggggcgacgatcaacattattttggctgccgtcaaagctcatggtacgaccacgattgaaaatgcggctaaagagcctgaaatcattgatttagcgacttttttgaataatatgggcgctaaaattcggggtgctggtaccgacgtaattcgaatcgaaggcgttccggcactgcattcgcgggcaacccatacgattattcctgatcggattgagacgggaacgtatctatccctggctgcttcgattggggacggtattttgctaaagaatgtgatccctgaacatatggagtcattcacggcaaaactagtcgaaatgggtgtcgatttacagattaatgaagatagtatttacgtcccacggtccaatgatttggacccaattcgggttaaaacaatgacttacccaggctttgccactgatttgcaacaaccaatcaccccattattattgcgtgctaacggtagtagcgtggtgattgatacgatttatccgcaacgcacgcaacacgttgaacagttacgtaagatgggggcggacattcgcgttcaagataacttgattgtcgtgggtcattcttcccacttacaaggtgcacatgtcgaggccggtgagattcggtctggggcggcactaatgattgctggtctcgcggctagtggcgttacggaaattagtcgcgctgacaatattctacgtggctatgatcgggtcatcgataaattgcatacacttggtgcggatgtggaaattgcagccgacgaagaagttcccgaaaactaacgatgtacagctaagaaagaacagtggttatggaaaaaattttaacaatgcacgatctcgagcagaaaacgttaaaagaaatttataactatgctcgtgagtataaaatttcttattattcgcaaatgaataaaaaggaactctcattagccgttctccgtgagcaggataaaaagcggggctttgtacaaatggaaggcgtcttggaaattattagccaagagggctatggctttttgcggccaattaattatgggccttcgcaggaagatatttatatttctcagtcgcagattcatcgctttggtcttcgtaacggagactatgtggctggtcaagcccggccaccgcgacctaacgaacggtattacggtttaatgcgggtagggacggttaacggtaaggatcctaatgaggccaagcaacggccccattttccagcgttaacaccactttatccacaaaaacaaattaagttatcgacaacggccgccgttttagcgacccgtttgattgatacttttgtcccgattggcttcggtcaacggggcttaattgtcgcacctcctaaagccggtaagacgacgctgttaaagaatattgcaaatggcatcgtcgccaattatccagacgctaagctgattatgttactgattgatgaacggcccgaagaagtgactgatttagagcggtcaatcaagggagaagtggtgagttcgacttttgatcaacaaccacaaaatcacgtgcgtgttgcggaattggtgcttgaacgtgcgcggcgcctagttgaagacaaacaggatgtgattatcttattggattcgattacccggcttacgcgggcatataatttggtcatcccgtctagcgggcggacgttgtctggtggggtcgatcccacggcgttttacaagcccaagcgattcttcggttccgcgcgcaatatcgaggaaggtggtagcctaacgattttaggcaccgcgttagtcgatacgggtagccggatggacgacatgatttatgaagaattcaaaggaactggcaactcagaattacagctatcccgcgagttagctgaacggcgggtcttcccggcgctagacttgaagcaatctagtacgcgtaaagaggaattgttggttagtcgtaagaatttggagccagtctggcagattcggcgatcaatgactggcaacgcgttagagtacaccgaacagcttttacaatttttaaaacacacgaagaccaacactgagtttgttcgtgatctagctagcttaaagttcactggtcaatcaacccggcggtcgcgtcgttaatactggcaggcaggctactttgtaggttgacgggaagctgtgattcgtgataacatgtttatcgttggttaaaactatgataatctctgtttcagcaaatgattcagggcaaaggagcgaaatacaatgcaaaaaggaattcatccagattaccatttagttgtgttccaagactcaactactggttttaagttcatctctggttcaacagcaacttcagcagaaactgttgaatgggaagatggtaatacttacccattgatccgtgttgaaattacgtcagattcacatccattctacactggtaagcaaaagtttaccaaggccgatggtgcggtcgatcgtttcaacaagaaatacggtctcaaataagcagacaattaaacggcgttccggcttcggcgggggcgtcttttttgtatgtgcaaatcatcgacgctcacaaacaaagccgcaccagttcgagtaatgaactggtgcggctttgtctcacttacgatatgattagtagcgcataatcgcgagagcagcggtttctacgggcatccggtctgcggggatgattcggatttgcccgttcatggcaatcacgacatcgaccaggtcgtcaattaaattatcaggagcagcaattggatcagttaattgaacatcggccgctggtaaggagccggcgacattcgcgtctgcggcgacaatcaaggtgtcgatccgcccacttagtgctggcttgatcatgtcaaaaggatcggccaatgctaactggcgggacttagcctgatcataacgttctagtaaaatgtcggctaattgggtatgccacatcgtctgaacgggttctgtggctgtttgcattgcgcccaccgttaagtttttcggtgacttattgatcatgaggtgttgtgacaggtacggattcttgttgacggcacggaagactgcctggttatgtggtagtcccattaagatcaatggccgtcgcgtcttttgtgaatgggcctgaacgtactgcgccacttgttggtaataatttcgttggtcaatatcgcgttcttcggccttcgcattatgaccatgatagttggcaccgtgaacggggctggcgttgaaattcaggtcaccgccacgtttttcagtgcccaatgcttctgtcagggtgcggggggcctcagctggcaaatcaagttcgacgaaactgccatcacgttgggcgtagagcgccatgctatcttcattgagtgctagcaagtcgaagtcgaattgatgctggcggtcggctagtactgggcgaatagctggcatgctattgacgctgacatggttgtcagtgggatattgtaagtcgaaaatgtgtaggtcacgactgttagtgatgatgcctgtctgagggccagtgtgctgtaaccagaaggcgttgtcattaattaattgctctagttgcgtcgcgtatggcgcaaattcggttttcggaaagtggtgggccatctgggtttcagcttcattaactaattgtttgaattgtaagcggcggcgattgaggtcgttgagcacaacggccgtgttgaggtaaattgcaatgtatgggccatcctcacgttgttgcattagttgattgagatcgttttttaccatcgtttccataggtccaacctgctttctgtttttgatacaattagcataacaagaatctgattacggacgcaaatataatgattatgataagctatagataattctaacgaactaaacgaattcggggctttattatgcgaactaattaaggtatatttaccgtagaacctttgataaagggcgtaaacaaattaggaggcgggattaatgaagtccaagcaacatcccgggttaaagtggttaggtcggggcgtttttgtcctgctggtgctagtatcattggcattaattttcaatgaacagatcaagagctggttagtgagttcatactcgccgaccgttacggctaagacggttaagcagaatacgaagaagaagagcgattttaacttctcaaaggtcaagtcacttgactttcagaccgttgccaaggcccgcatgaataagaatgcaatcaacgtgattggctcgattgcgattccgtccgttgatttgtacctgccaattggtaatggtgtcagcaatgaaacgttagcattggcggctggcacgatgaaagctaatcagaagatggggcagggtaactacgcgttggctggtcaccatatgatcaagcatggcgcactattcagtccgttgtactataagagcaaggttggccaaatgatttatgtgagtgatgccaaaaagatttatgcgtataagacgagtcagcgaacattcattaaagcaactgatgtccaagtaattgatgatgttcctggtcagaagctgattaccctaattacctgtgataagaccggggcgggtcgcttaatgattcgcggtaagtatgaacagcaatggtcgtttaagtcggcgccaactcaggttcagaaggcctttacaagtcattttaataacaaatattaacaattattacattctaggggtatcgatatcttctaacggaatttcacggtacaatataacttaaggtcacatgtctcagataagacataatttagagggggtctattgatgatagctttaattatcgttgcggtcgtattggttttgatcgcaatttacgtggtaatttataacggtttagttaagtcacggatgtatacgcaggaagcgtggagccaaatcgatgttcagctaaaacggcggactgatttgattcctaatctggtcaatacggtcaaaggttacgcgaaacatgaaaagagtaccttagcggaagtgatttcattacggaatcaattaacgcaagtgccgagcggtgatcaccaacaggctatggcagtttctgatcaattgacaaattcgttgaagagcatttttgcgttagctgaaagctaccctgatttgaaggcgaatcaagaattcggtaagctgatggaagagttgaccaatacagaaaacaagattgcttattcacggcaactgttcaactctagcgctgccagctataacatgaagttacaacaattcccgtcaaatattattgctggcattcatcacttcaagaacgttgaattcttaactgttcctgaagcagaaaaagcagcacccacggtttcatttgaagattagaggttatgcccatgttatttgagcaaattgcccgcaacaagcggcacacgttatacgtgatggccgcttttgtcatattacttgcagtgattggtttagcagttggctacgtgttttttaatagtgcgattgcagggttactagtagccttgattgcagcggtattttatatggtattaatgattagtcagtcgactgacattgtcatgagcatgaatcatggacgtgagctgcatcaagctgacgatgatccagagctctggcacattgtggaagacatggcgttggttgctaaagtaccgatgccacgtgtctttattattgatgatgagagccccaatgcgtttgcgacaggaaatgaccctgagcatgcggcagttgcagtgacaactggtattcaggcacgattaacgcgtgaagagatggaaggcgtcattggtcacgagatgagtcatgtgcgtaactatgatattcggttacagaccattgccttggctctgacagcggccatcagtttgttagtcaattggggtatgaacgccttttggtggggcggtggccggcgcagtcgggataatgatcgtgacggcaacggtgcccaggtcttactaatgatcctagcgattgttgtcattattttagcgccgctagcagctagtttagtgcagatggcgctatctcgtaatcgcgaatacttagcggatgccggcagtgtggaactgactcgtaatccgatgggcttaatcagtgcccttgaaaaaatcgatgacagccaacccatgcaagcggcggatcctagtagcgcggccctctatatttctgatccgtttaaggcgaagaaatcatggacgcacttattcgatacccacccaccgatggctgatcgcatcactcgtttaaaaaacatgtaataaaaaaatgcgtttaggttaataacggattataatgaaaacaaatagaaagttgaaagagtgagacggttgcaacgcaaatatatttacgccaatttggaaaaactggataaccttgtctttgcttacgggatcgaccagagcgactttgtgcatggtatcaaacgcttgccagctaacttggtctcgttagtcggtgttgatgataacgagcatgcggtaaatgctcacacgggtctgaacgtcattaatgatgaaaatgaaattcggcgatatttgttacagagtcacgcgttacccgttaagtggcttgattatgatgaagttggcgatttggattttctaaccgcgactgagattgccgagctattgtatctcggacatatggatcgtccaattcgatcaccgtttaattacaaactgcgcaaccactacgttttcttggaacaacgcaatggtggtatcaaagtgtacttctattatatttccgcatttagccatattttaagtgctgccattgtgcggcacactttggcagcttaccgtggccggcgtatgtttatgcgttcactgagtgttccacgagtacctgaagcgattctcaagcaactcgttcaattgatgccagatggtttgttcatttactttgatcagtcaatggttcggcaacgccaattattggtgccggtgcacacggagacgacaggcaatgaaatcgaagtttttgatcccgctcgtggtggagagaatcggcgaacccaccatgtcgcgacccttacttttaacttgaattcaggcgtgtgggacttgcaagtgcaggaccaggctgcgttcgaagaacatttatagtattatcatcttaacgcttggctgatcattcagcgggcgtttttaagtcgtttggggcgggatttaggggctaaattggtctagccatagagtccctggggtcaaagtggtataatttttatgcgcgtagcttgaattgggctacgattcgagaaagtggaaccttagtcagaacttggctgaccgacaagtggtcgccatgaatggagagtttaatcgatatgaagatgcaagttgccgaaattgctaaggccgttcaagcggtcaatgccgaacaggcgtggcccgatgttaatgtaacgggtgtggcgtttgatagccgaaagctccaagcaggggatctatttattccgctgatgggcgctaatgatggtcatcaatatattcaaagtgcaatcgagcacggggccgttgctaccttatgggccagcgaccatgccgacgacgttccagaagacttacctgtcattatggttgctgatacattgacggcactacagcagctggggcaatactatttacaaaaaattaatccgaaagtcgtggctgttacgggtagtaatggtaaaacaacgacgaaggatatgattgcgagtgttttgagcactcagtttaacgtgacaaagacgcacgccaactttaacaatcagattggtgtgccagtgacgttactcagtatggaaccgaatacagaagtggtcgtcgttgaaatggggatggaccattttggcgagttggatttcttgagccgtctcgttcaaccagacgttgcggtgattaccatgattggggaagcccacattgagttctttggtacacgggatcgaattgctgatgccaaaatggaaattgtccacggcttaaaagaagatggcacgttcatttttaatggtgatgaaccactgctacaagaacgtgctaaggaagtcagtcagcatcaacggacgtttgggttggatgatacgaacaccttagcaggcagtgatatcacgactagtcgggctcaaacgcaatttaagacgagtctgtggccggacaacacgtacacaattccgatgatgggtgcgtacaatgtcaataatgcattggcggcactcttggtagctgatacttttcacattcgaccagccgctgcgcaacaagcaatcgtcagttttgtgccgacggagaaccggacggaatggttaactggttaccgtggagaagccatcttaagtgatgtttataactctaatccaacggcagctcgacgggtcctagccgcttttgcggcggtacctactaagggtcagcgaatcgctgtactcggtgatatgcttgagttaggtgaacagtcggatgcactacacatgagtttagccagtgaattggatccagccacgattgccagcgtctatttgaatggtgaacatatgcgagcgttggcagaagtgctacaagaaaagtacccagccggtgcggtccactattatcaaacggatcaacagcctcaattgattgccgacttaacggcaacggttagtgcggatgatcaggtcttattgaaggggagtcacgggattcaccttgaaaaggttctgacggcgctggaagctgctcctgaaaaataaaatttaagtgattcgattaagcaggcccctcgcaatgactgggtaatggtgacgctaacattagactgataatgttatttcccttccggtattgctaggggctttgcttgcttatttagaataaccggtgtatgataattcagttgtaccatatgaaagtcagaccgttggcttacatgacagcgtcttacgggaaacggattttttcctagctggcagtaatcccatggtgtcatccttaggaggaaacatatttgaagtttacagaactaggcttatccgatagcctacttaaagcagttaatcgggccggatacgaagaagcgaccccgattcaagccgaaaccattccaatggttctagaaggcaaagatgtgattggtcaagcacaaaccggtactgggaagaccgccgcgtttgcattaccaatcttacaacgcttggattttgacaaccataacattcaagcattagttgtttcaccaacgcgtgaattagcaatccaaactcaggaagaaatcttccgcttaggtaaagacgaacgggcgaaagtccaagtcgtttacggtggtgctgatattcggcgccaaatcagaaatctgaagcaaaacccacaagtaatcgtcggaactcctggccggttgcttgaccacattcgccggggcacggtcaagttagaccacgtcaagatgttagttcttgatgaagctgacgaaatgttaaacatgggtttcttggaagatatcgaatcaattatcaaacaagtgccggatgaacgccaaactatgttgttctccgcaacgatgccacctgaaatcaaacgcattggtgtgcagttcatgaaggaaccgcatcacgttaagatcaaatcaaaagaaatgactgctgatacggtcgatcaatattacgttaaagccaaagaatttgaaaagttcgatattatgactcggttgtttgatgttcaggcacctgaactcacaatcgtgtttggtcgaacgaaacgtcgagttgacgaattatcaaagggtctcgaagcacgtggttataatgccgctgggattcatggtgatttgagccaacaacgtcggacgcaaatcatgcgtcaattcaaggctggtaaattggatattctggttgcaaccgatgtggctgctcggggacttgatgtttctggtgtgacccacgtttacaattacgatattccacaggatccggacagttatgttcaccggattggccgtactggccgtgccggacacaagggtgtttcattaacttttgtaacaccaaacgaaatggaatatttgcgggtcatcgaaaagttgaccaagaagcggatgttaccattgaagccaccaactgaatctgaagcttttgctggccaattagctgctgcagaagcgaatgttgattcgttagttgctaagacttcgactgaaaagtatgctgatcaagctgctgaattattacaaaaatacgatgctactgatctagttgctgccttgttaaatgacttaaccaaggacgacgcctcagccgtacccgttaagattacgccagaacgcccattacctcgtcacaaaggtggcggcggtaacaaccggcgtggcggatatcgtggcggtaatcgcaaccgcaataacagtcatggcaatggtcgtggcggttattctcacaatggtcgcaatcgcgaccgtgatcgtaacggtggccgtggcgatcggaagagcaatggttataaaggtcgcagtcgcgatgataaccggagcagcaaccgcaaccatgatgaaggtcgcaagcaaagcagcaagcggagctatacgatccgcaccaatgattaaagtcaacgcaccaatgattaaagtcaacgcaccaatgattaaagtcaacgcacaaattaagttgaattaaattaactttgcacaaaagccgagcgcatgctcggctttttttatgccctacaatgttagaatacaagtagtcggcagatgttcgtatgaattattgttaaaacgttccaatttaattggtttgttgttcgtcagcacttgcacgtcttattccgacctccggggctgggtgccaattgctggaacgcagccgacgtcgatttgagctaacgcccaacccgcgtcatctcaaatacgagtcttattctaagccggaagcaacccacttccgcctaagaataacttggctactgagcattgtcacccagcccctccagtctcaagcctgtgagaggccacgggttgaagccgagcattgcctagccaccacaggctttagtggcaccgaacttagcacaatctatcgttgcctattttgatactggaactttaaacaaagcgttaagtgcactagcactttgtcgagagattaaatcttactattttgattcagaattagtgaattatctcaatatcactttcagtctgacagttgattgacaaaattatggtttatgaaaaacaatgacgaattcaccaaaagttggggccgcacatgtccgccactcgaacactgtcccgactggaaggcgtttcggccaatgctcagcggtgaaattccacttagcaagcgtcctttgcttggttagtggaagaccagtatttaagacgtggtcttcggcttaaatctgtgtccaccgcgttccagcaattggccgaaatgcctggaggtcggtgttaggacgcgctaacaaaacatgtttacactcactcgacttttttccagcggtctaagctggccgactttgacttgacgcgtttggaacgttttaacaataattcatgctgacatgaaaagattgcgtgtatgggcccttttatcgcggcggtagctgtggtaaattggaaacatcagcctaagttgacgtgataataatgagatagagggggtcacagcgtgatttatggtaccggcattgatttaactgagcttagtcggattgaagcgattctagcgaaggggctgagattgcctgaaaagatcttaacaccggctgaattggcggtgttttcacgttacccggttaaacgccagatcgagtttatggcagggcgtttttcagctaaggaagcatatagtaaggcatatggcacgggaattggtgcggcagttggatttcaagatatcgaaattttagacaacgcccagggtaaaccggaagttacgcgccacccgtttgatggtccagcgtggatttcaatttcacacacggatacgttagtaatgacacaagttatattggaaagaggcaatttgtgatggttgtaattggggagcaccgccacacacaagtcacagtcgacttgcaggcaattaagacaaatattagtaatgaaatggcgcaaaaggatgagttgaccgagttatgggcagtcgttaaagcgaatggttatggacatggaattatccaagttgctcaggccgccaaagaagccggggcgaccggcttttgtgttgcaatcctggatgaggccttagcgttgcgggccgctggctttgcggaacccatcctagtacttggaattacggaaccggaatacgccccgctggtagctgaaaaggatatttcactagctgttggaacgcaagattggctgactacggccgcagcaattttagcggctaaccaagtgacgacaccacttcacgttcatcttgcattagatacgggtatgggacgaatcgggtttcagacgcccgaagaattggcaacggcggttacgactttgcgtcaaccgcagtcaccatttgactttgaagggatttttacgcattttgcaacggctgaccaggcagatgatacgtattttactcatcaattaaataattggaaacacttgattgcagtggtggatgagctaccacgctatgtccacgtgtccaattcggccaccagtctctggcatcaagcttgcaatggcaacatggtgcgctttggggttgcactctatggtctaaatccttctggtcgcgaactcagcgcaccataccccttgcaacccgcgttgtcgctaacggcacgcttgacgtttgttaaacgcttggctcggggcaaatcggtcagctatggtgccacgtatacggccgcacaggatgaatggattggcacggtgccgattgggtatgcggacggctatgaacgccgattacaaggcttccatgtacttgttgatggtgagttttgcgaaatcgtcggacgggtctgcatggaccagctgatggttcgtctgccacatgaagtaccggttggagctaaggtaactttggttggcacggacggtgctcgtaccatttcgttgcaagatattgctgactattgtgggacaattcattatgagattgcttgtgggttagcaccacgagtgccgagagtttatatagattaagttttatcagacgataggtttgcgccgactgtctcgtacaggctatggttacatggttggttattgagattaagccaataaaatgagtgccggagaaattctggcgctcattttttagagtctcctattttattgatgagggctgttaagtttatttcagtgattcgattgatttatcggcatctaattataagttcgtttatttttaaacattgatgaaatcatcactgggcagtcttaattaatcggtctgaagtattagttttaacggtgcttagcgattagttctttggattaaattggtaaacggttgctaaaagtgaatggttcatgctattatgagtagcaagatggttatattggggtactatcagatacattgggtatcgaataaagggagatgaggcgatggccgcagctgacattaagcgtggtgacatcttttatgcagatttatcaccagtcgtaggctccgaacaaggaggcatgcgtccagtactaatcgtgcaaaataatgtcggtaaccattacagtcccacagtgattgtcgcggcaatcactgctaaggttcaaaaagcgaagatgccaacacatgttaacatcaacgctgcccatacggggattgaaaaaaattcggttgtgttgttggagcagatacgaacgattgataagcaacggcttaaagatcgcgtcactcatttggatgatcagacgatgcgccgagttgataatgcgttacagattagtattgggttagctgatcgaacacgacgtcggccacaacgcacgtttcaatcatagtcaatcgatggggattaattatttacataattgaactatttcggtgcgatgaccgagtatggataatcagcgggtttcaattcagttaatgactggattgaaacccgcttttagtttctaaattggctaccggtaaatgttacagggcctgttggagcatttagtgatgagctaacattattgtgcattatgattgtctttctgacgacgattaggtaagctagttgaacacattataacgagggacgattggctgtaaatcgtgaatatcgctgaaaggatgggggcataatgagtaaacaggctcagttcaataagcatcgggtggcaggattgttagtcgcgatgggtgttgtatatggtgatattggaaccagtccgttatacgtgatgaaggccatcattaccggtcaaggtgggatgcaggccgttgatgagaagtttatgttgggggccgtctcgctagttttttggacaatgacgctgctcacgaccgttaagtacgttttgatcgcgttaaacgcggataatcatggcgaaggcggtatcttttcactattcgcattggtgcgtcatcgtgcgcgctggttagtcattcctgccatgattggtggggctgcgttactggcggatggggcgctaacccccgcagtgacagttacgactgccatcgaaggcttacgcgatgtaccagcatacgttcaactgtttggtgccagccaaaatacgattatactgattacgcttggaattatcaccctattatttatgctgcaacgttttggaacgaacacgattggcaagttatttggccccatcatgttgggctggttcacgtttttgggagtcagtggcttcgttaatctggtgcaggattggacgatcctgcgtgcactgaatccctattatgcgtggttactcttgatcagcccggcgaacaaagtgggaatcttgattctagggagcgtctttctggcaacgaccggtgctgaggccctatacagtgaccttgggcacgtcggcaaaacgaatattcggttgagctggccgtatgtcaaagtttgtctactactcagctatttcggtcaggccgcatggattttaggtcccggccaagcgattcagggacatgtgaatcccttttttgcaatgttacctgctagcctgacgatggcggcagtgatttttgcgacgctcgcggccattatcgcgtcacagtcgctgatcagtgggtcgtttacgttagttagtgaagcgattcgactgaaactattcccccgattactgactacttaccccggtaaagcagtgggccaaatgtatttaccggtcgttaactgggggctgtggggcgtgacgagtatgctggtgattttctttcaaactagtgaaagaatggaagctgcatacgggttagccatcacactgacaatgctgatgacgaccactttgatctacgcgtttttacggcaaaagcgcttaccattaatcggtgcgggactactgaccggtttcttcgcgaccatcgaagtgattttcctgattgccagcgcagccaagttctggcacggcggctacgtagcggtcggacttgctttactaattttcctagtgatggccgtgtggtatcgtggcgaacaaattgtccgacaacataaccacccgcttagtttacgacaatatcaggaccagcttgctaagttacgcgacgatcagacggtggacaagttccagacgaacgtcgtcttcctaacaagccgaatggatggcgaccaagtggagcgaaaggtattatattcgattttagacaagtggccgaaacgtgccgacgtctactggtttgttaatgtgacaatcacggatgaaccgtataccgcggagtatactgtcgacacgttagcaacggactatttggtaactgttaagttatacctgggctttcgtgtccgccaagatattaaccgctatttacggacgattgtccgcgacttaatggctactggacgtttagcggcgcaaaagcagacatattcagtcacttctggccgcgatgtcggtgacttccgcttcgttatcatcgaggagaagttagaaaatggtagtcggttatcccgcttggatcgattagtgatcgagacgaaattaatgattaaaaaatacgcgacaacgcctgccaaatggttcggcctagaattctccgaggtgactcttgaaaccgttccaattctattcaatgagatcccggcgttaccgatcactgaaagacagtaatgccatgcagatttctgggggtcagaatcagccagcttagatttgcttgaaaaagttcagcgtagtgtaaacacgctctacgacatctaattgtaaggcgcttcacgtcggctacgttccagcaattggcaactagccccgaaatccggaataggacgaacaagtgctgaaaaatagaaaactaactgtcggcttgcttaacaactcatctaattttaattttttcttgagcaactgataactcaaaactaatttcaatagctgatactggacgcaaaacgttgatttgacagcgataaaagaacgactgaattcaaatcaaaaattagaaacattaaattttgtgttgacaagtgtgaacttagaactataatctaattatattctaattattcaaatgcggtgatgagataagtaaatcaatcgtgggtttttcagagagccgggtcaggtgcaagccggtattcccgcatggttgaaaatggtcttggagcattcagtgccgaatgattaagcgctgacggtggtccccgataaacggacaaaggtatctcaattcagtgagattgacgtacctgctgaggactattttgcgaaaaatagtcgaattaaaggtggtaacacgagtcatcgtccttctgtcataacgacagtggggcgattttttattatatatttttggggaggcttcgcgtatgcgaaaaaaggaaattatttttgggttattaagttttattgcactgggaacagtattagctggctgcggcagtagcagtgctagtagtaaggatacatctaaaacctataagtatggtgaagtaacgataccagctaaggacggttctatttgtaatgcgccaaattatatcgcgtatgagaaggggttctttaagaaaaatggtatcaaggccaaactagtagcgaacccgcgggatatcagtgacctagaagcgggttttgcgagtggcaaatatgacgcgcaaaatggtgattttcaatacttacctgcgattcaaaacggggcgcaaatcaaagctgttggtggaatccaccaaggctgtatcaagttgctggttccgaaaaactcaagcattaagagtgttaaggacttaaaaggcaagacgattgggattccggctcagggttcaacaccacaatacgtgacgtccattgcacttcaacatgcgggtattgatccgaagacgggagtaacgtggaaggtttacagcactgatctattggcaaaggcggctgaaaaggggcaggtcgatgcaattgggacggtcgatccgtatgcttaccaagcacaaaaggaatctgggtttaagaccattattgataataataacaatagtggcaatgctaagatggctgcaatgggaatgaaatcaaagggtgcttgctgttacttgtacgtttcgagcaagttagtcaaagagaatccagcgaaggctaaggccattgtccgttcatacaaacaagccgctgcttggatcaataaccatcctgaagagacagcaaagattgaattaaataaggggtatgtctccaagacgaagtttatcaatgtgaagaatgtgacccagatcttgaaagatgaacattttgaactaaatcttaagacaggtaaagaagatttaagttattatatcaagcaattgaagcaagcaggatatttgaagaagaatacgaataacaagcaattgttgaagcaagcttattggtatccagatttatctaagaactaagttcaaggaggtagaatagtatgcaaataacagcagtccaattgagtcgaaaaaaagctgtgcaggcagctaagacaactggccgttattggaagccctggcacttgacctggaacattgttagtttagtcgtattagcaattgcgtattttgaaaaccaattggttgtatcacaggaaaccgttaataatcagacgtatcattggtttttaggtgggtactttgcttatttattgattgttacgctgattggcgcagttacaaatggtcgaattcgctggtataatggacattttgcccagttgaacgtttcgttagttggcttgctgatcgtgcaggatcttctgaccgaaaagtttgccgttctagaacagcctttcttcgtgagctttgcacaaatcttggaccagatgcgcgaaaatgccggcttgctctgggcttcgacgttgtcatcattagcgctttggttgattagttttgtgattgggaccattcttggaatcttacttggtttgggcatgggacgctatcgtgagtttaactactgggcattcccctacttgaaggtcatcgggattatccctgcggctgcatggatgccgctgacgatggtcatctttccgactagttacatggccgaagtcttcttgattgccttctcggtttggtttccagtggccttcatgacgattggtggcgttcaagggattagcaaggaatacttcgaatcagcaaagaccttaggatttagtgagtggcagattatccgcaaaatcgtccttcccggagcgttgccaagtatctttactggcgtttatacggcaatgggattgtcgtttacaatgctggtaatttccgagatgattggtgctaaggtcggactgggctggtttatcaactgggcaaagggtaccgggaattatacacaagtctatgcggcaattgtgattatggcgattctgttttcagtgttatttgcggtgtttaccaaagttcaagattactgcctacgttggcgcgatggtgctcactagaaaggagcttataagatgggattacttgcagttcaacatgttaatcagcggcttcaagacaatgatggtcatcagatcgacgtgctagatgatattgatttcaccgtcaatccgggtgagttcgtagcaatcattgggccgtctggttgtggtaagaccacgttactacgcctgatttctggattagaccatcccgctagcggtcagctaacgatcgataatcagcagattaagcgaccagataattctcgcggttatgttttccaacatggcagcctttttccatggtcaacaatcaaggagaatattagtgtcggcctgaaagtgacgcgtggtcggcattatgaccaccaattggtcgaccattatattgaattgatggggctaaaaggctttgaaaatgcttatccgcatcaggtttctggtgggatggcccaacgagctgccctcgcgcggtcaattatcatgaacccgcagctcctacttttggatgagccgatgggggctcttgatgcgtttacacgtgcggatattcagaatgtcatcgaacaggtttggcagcagacacagacgacgatgattttagttactcatgatatcgatgaggcagtctacttgagtgaccgaattattgtgatgacgcctcgtcctgggagaatcaaagaaattgtgacaaatccattaccacatccacggtcacggttgagtgtcgattttgctgaatttcggcatcggattcaagataaattaaactttggcgctcatgatggacaggttgctgggtgatgactaaaaaatgcttatcaagatgattggcgagataccagtcttgataagcatttttgctgtgaaaaaacaggatcgcatggtggtgagcttgatatggccatccaggggacttcgttagttggactaagtacgaagaagcaggcttattcgcttaccatcgttgtcgtactggccaatagggtcttaagcgtatcaatcgccgtaatcaatggctgtccatgattcaatgcagcgatagccacgggattatcaggttggtcattaagcgtgaaacccactgctttagtctttgcaggccaatcagtcgtgttagcgattgttgtgacggtgaggtggttagccgcgaacagttcctggaccgcgggttgcgccacagtggcaatatcggtgatgagaccatccacggtttgccaagtctctaagtgataactatcagccatggcggcatgccaagcggtcgtgaaagtcgggccgataccaagagtctcaccagttgatttcatctcaggacttaaaacgactggtgattgtggcaatttattgaaagagaagactggggcctttatagcaatttgttgtggaacgggtgtcaagagtccggggactaggccaagggttgctaaactttgaccgagaattagccgggttgccaattgtgccagtggcaagtgagtaaccttgctcatgtaaggaactgttcgacttgcccgcggattaacgtcgattacgtagacatcatcggtgacgacgaactgaatgttcatcataccgacacagtggaggtgttgtgctaatttggtggcaatggtgacgatcttatcttgaacagcagggctgaggtgctgtggtggatagactgtaatggaatcgccagaatgaacgccagcaccttcaatatgttccatgattcctggaatgaagcacgacgttccgtcggagagaacgtcaacttcacactcggttcccgccaagtattggtccattaagataggcgcaccatggccagctgccaccgctgatttaataactggcgtgagctcatgatcgttatgaacgattgccatggcccggccgccgagtacaaagcttggccgtacgagtaaggggtaaccgattgcgtgagctgcttgacgggcaccggataactcagttacggtcgttccagcggcttgggcaatctttagtagacgtaaacagtccgcaaaagattgccggtcttcggtcaaatcggtagcggacacactggttcctaggacggtgactcctaatttagtgagctgatgggcaaggttgatcgcagtttggcccccaaattgaacgatgacgcccgcgggttgctccaacgcaatgattggcatcaaacgttcgattgttagtggctcgaaataaagcttatccgaggtagaaaagtcggtggagaccgtctcgggattgttattgacgatgattgcatggtagccagcttgttgaatggccttgacacagtgaacggtggtgtagtcgaattcgatgccttgtccgattcgaatggggcctgatccgagtactaaaatactgtgtcctagtgggtgactctcattagtttgtccaaaagcagtgctgtaaaaatatggtgtaacactggcaaattcaccagcacacgtatcgaccattttataaacgaagggtaaatcagcagtcatggcagcaatggtcgctaccgaagtttgggcataatgcgccatggtcgccagactcacaccgtactttttcgccgataagaggtgttgggacgtcggcacttgcttgatattccggatgagttgggcgatgtgctgtaacttactcaagaaaaatggcgtgatttgcgttagcgtcgctaattttgctaacggccaacccgcttgcagcgccgccaatagatagaagagtcgctgatctgtcgggtgggtcaattggtcgatatattcagtcgtggtgacgtggtggtcaggggtcaaggaagcttggatcttgggatcgatttcaagcgaagcaatcgccttgagcgtggcttcctccaaggttgacccaatcgccatgacctcccccgtggctttcatctgtgttcccaagtgagcgtcggccgttggaaacttgtcaaacgcaaaccgggggattttggcaaccacatagtctaaagctggttcaaaggccgcataggttgtctgcgtgactggattattgatctcagataaatttagaccaattgcgatatcggctgcaattttggcaattggatatcccgtcgctttagaagctagcgccgatgaacgactgacccgcgggttcacttcgatgacgtagtactgacgactattcgggtcttgagcgagttgaacgttgcacccacctctaatgtcgagggcttccacaatcgtcaaagttgccgttcgtagctgctgatattcagtgtcagtcaaagtctgaacgggggcatacacgatagaatcgccagtgtgaataccgaccggatcgaagttttccatggaacagacgatgatcttggtaccctgattatcacgcatgacttcgaattcaatttctttgaagccggcgatactttgttcaatcaggcactcggtgacgggggacatggtcagcccccgctgtaacgtttgggtcaattcggcggcattattggcaatgccaccacctgaacccccgagtgtaaaggctggacgaacaatgaccggataaccgattttttcagcaaacgacaatgcactggtcacgtggtgaacagtggtacttgctggaatcggttgatggagccgcttcataagtgttttaaatgctgcccggtcttcagcttgattgatggtggctagggaagttcctagcagttggatcttcaactcattaagaacgccagcctgatctaacgccatcgctaggttcaatccggtttgtccaccaagtgtcgggagcaaagcatcagggtgggtggcccgcagaattttagtgacactggtcaaagtcagaggttctaagtagacttcgtcggcggtggccgtgtcagtcatgatggttgctgggtttgaattgatcaaaatgacatgatatccggccgctttaaggcttagacaagcctgagtaccggcatagtcgaactcagcggcttgaccgattttgattggaccagaaccgatgacagcaatcgaatgaatggcattgtttttaggcattaacaaccgcctccttttgaattgttagtaagaaatcatcgaaaaattgcccagcttcctggggtcccgggtgtgcttcgggatggaattgcaccgacattacggcctggtgcggtaggcgcaagccttcaatgctgccgtcatttaattcagtgtgcgtgacgatcagcggggtgcccttgatcgatgccggatcgacggcgtaatcatgattttgcgaagtcatgataatacgaccgtcagcgcaggcttgtaccggatggtttagcccgtggtgaccaaaggaaagctggtaagtctgagcaccataggcgagcgcaatcaactgatgaccaaggcaaatgccagccagcggataacgttgtgcgagttggcgaatggtcgctaagtaagtgtgatagtcggtcggatcaccgggaccgttggataacaaaattccgtcagggtgatacgcggccacggccttgagactagctgtaggtggaaggacaacaacgtccgcgccccgggcttgcaattcagcggtgatagctgctttttcaccaaagttgagaatcgcgacgcgtggacggatggtggtcgtcgctactgggaggggggtagccgttagtacttggggtgcgaatgtggcgagttgcgcttcaaaatcagtgatgggatgattgctcaagattgccatctgggctcccgtttggcgaatgtgaatcgttaggtcacgagtatcgacgccttcaatgccggctacatggtggattgtcagaaaacttgccagtgattggcgactagtatagtgatcattaaaagtggtcagctcgtgaacgatgatggcttgtgcgccaatcgttggtgcctgggccacggtcggatcgataccataattaccaattaatgggtaagtgaaggcaatcatttgatttaggtaggatggatcagtcaatgtttcctgataacccgtcattcccgtattgaagacgatgcgccccgcaacctctagctggcaatccccaattgccgttccaatccactgtgtgccgtccgctaaagttaagtatttgttcatcccaatcgcacctttctgataatttggttaaaatttcattttggttaatgggataagtaaacatcattttattgtgaatgtcaattaaaaatacatattaagtgcataaataactgaataaagctaaaaatatgcaattaatagaataaaagtgaatattttttcaataaagcttgcaatttaaaagcgatgagaatatagtgtgaatcatactttttgcatgaacatgcagctaatacactatttttgaatatttgaggtgattatatgcaagtcgcgctagttggcgttacggggtacagtggcatggtgttgtaccggctcttgaaacaacatcccgagatcgatcgcatccaattatacgggcacgtgggagcaactacggtggcattaaagacggtggcagccatgtaccagaaagaaacggcggttattcgaccattcgatgcgacggcaatcatgcgcgataacgcgattgtgttctttgcgacatcagcgggtatcacgcgacaattggcattaccattcatcgctgctcattttccagtcatcgatttatctggtgacttccgcttgcatgatccagagcaatatcagcggtggtaccaacgtgatccagcaccggcggccgctttggcacaggcgagctacggcttagctgatatgccggcgcccttgtccacctacattgcgaatcccggctgttatgcgactgctacgttattaggactagcgccacttgctcagcagcagttggtcgaaccgacttcgattgttgtggatgctaagtccggcttatctggtgctggcaaacgagcgacagctgcgagtcattacgtcgctgtgaatgataatttgagtttatataagttgaatcaacatcaacatatccctgaaatgatgcaacagttacagcagtggtggtccgcgatttctgcgattgaatttactaccactttgattccagcaacgcgtgggattatgacgacgatttatgccaaagcgaagtcagcattgacaacgacgcaggtctgcgcagcttttaccgcgacctatcatgagcagccgttcgtgcaagtgctaccaacggggatgccgacgctcaaggacgttgttgggtctaataactgtgcgttaggcgttgattataatccggtcacgaacaccatcgtggttgtgagcgtcattgacaatttgatgaaaggtgctgcggggcaggccgttcagaattttaatcgctattttgatttcgcggttacggccggattaccgacgttacctgtatttccctgataaggtgcaataagagaggaagttatgcagatgcaagttttaacgaatacgaagtttgaaacggttgcctttcagtggccggcaggtttttacagtgatggcattcatattggtcttcgtcgtcataaaaaagattttggttggctattttcaaaagtgcctgccagtgcggctggaacttatacgacgaatcagtttcaggcagcaccaactaagttaactaaacagatgatcgaccagggccaccaattacagggactgctgctgaacagtgcaatcgccaattcttgtactggcgagcaggggtggcagaatgcgctgcaagaacaagcctggttagcgaataaactaaacgtggcgccgaacttgattggcgttgcttcaactgggctgattggtgctcagttacccatggataaaatcaaaaacggcttgccgcaattgaccccaacgaagagtgacgcggtgacctacgccgtgttaacgacagaccagcatccaaaaaccgtctgtgtgcagtgtgaactcagcggccagttagttaccttgaccggttttgccaaaggttctggaatgattcatcccaagatggcaaccatgcttggttttgtcaccactgatgcccaaatagatgggccagttttacaggacatgctaagtactaacgttgatcagacattcaatcaaattactgttgacggtgacacgtctactaatgacatggtggtcacgttggcaaatggtctggcagataatccgagtttacaagcgggtaccaccgactatgatatttttaatcaggcgttgcactatgtcttaggcaaacttgccaagcaaattgccgctgacggtgagggtgcgaccaagttagtcgaatgtaatgtggtccacgccgctacaacgtttgatggtcagcaaatcgccaaagcaattgttggctctaacctcgttaaggcggccattttcggtgaagacccgaattgggggcgaatcattagcacgattggcgccactgatgcagacatcgatgtggcgacggtcgatattgaaatgaacggcgttttacttgttcaacaaagtctggccgttgactttgatatggcagcggtgcaggcgaccttacgtgataaccagattatgatcgatgttgatttacatcacggtacagcaagtggtcaggcttggggttgtgacttgacttacaactacgtcaaaattaacgcgagctatcatacttaaacggaggtggtgaaaatgacaaaattgattgtaattaagattgggggccaggcgattagccaattgagcaccactttctttgaccaaatcgcacagtggtaccaacagcattatcagattctgatcgtacacggtggggggccaatgatcaatcgactgacgactcagcttgctttgcccgtgcataaggtgaacgggttgcgggtgacggatgcggcgaccttagtgctcaccaagttggccctgctaggagatgcgcaaccagccttacttgcaaaattaacgcaacatcacctacctgtgttggggctcaatgcggcggataatcagttactaactggtgaattgattgattatcgacagctagggtatgtcggccggctcaccgctgtcaatcaagtgcaattaatgcaattgttggctcatcatatcggtattttggcccctttagccttaactgagacgggacaatggctcaatgtcaatgcggatatggcagcgaccgtgctagctcaacaactacatgctgaaaaattggttttgctaaccgatgtcccgggaattatacatcacggtaatgtgatgacatcactatcgccacaacaagctcagcaattgattcgaacagctgtgatcaccgcgggaatgcaacccaaagttcaagctgcaattgccgcgattcagacgggagtcaagcaggctattattacgaatgcaatcgatcaaccaggaaccgcaattattcaggaggtggccgtatgaccatgcaacacgtgtttccaacctatcaacgttttccatttgccattacggatggtcagggcgttcatctgactgataatcatggcaagacgtatttagattttacggcgggaatcggggtctgcaactttgggtatcaccaaccacaaattcaggcggccgtcacccagcagttgacgcatatctggcatacgtcgaatttatacgaaaatgaattacaagatgccgttgccggcctgttagcgaatggtgaagagcgactcgtatactttgcaaattccggaaccgaagctaatgaagctgcattaaaactcgcacggaagtacacgggtaaaaccggcatcttagcttttcagcattcatttcacggtcgaacctatggcgctatgtcgatgacgggcaatcctcatattcaggctggctatgcgccattagtgcctggcatcacgtttgcaacctataatgacgacgcggctttggacaaaatcacaccagagttggcggccgttattttagaagtcgttcaaggtgaaggcggcgtctttgcgggacaaacagcttggttacaagcggttaatgcgaaatgccaagcaacgggtgttttgttgattattgatgaggtgcagacgggaatcggtcggactggttaccggatggcctatgaaggttacggcctggatcctgatatctacacggtcgccaagggcttagcgaatggcttgccagtgggggcaatggttggtcggcggcaattagctactgcctttggtccgggcagccatggctcgacgttcgccggtaatgctgttgctatggcggcggcaaaacgtgtcttgacccaattaacaccggcgctgttaacgacggttcgggcccatgccgaacttgtctggcaagccctagcgactcaagtcgaaccgataccggtagtgaaacaaatcacggggaagggcctaatgattggaatccacttagatgaacaaatcccggttaatcaagtcatcacccggctacaagtagaaggcttattgacgttatcagctggcgataatacgttacgtttgttacccccaattgtgatgcaaccggccgatttattagctgggattgccttgattgcaaaggtactgacaactttgacaacggaggtcacgacgaatgaataatcaatttgaaggtcggtcattcttgaaggaaatcgactatacaccaacagaattagcttacttaattgactttgctagtcacttgaagacccttaaagcacaccatatcccacacccttatttacaaggaaaaaatattgcgttgctgtttgaaaaaacgtcgacacggacacgttctgcgtttactgtggcggctaatgatctgggcgcgaatccagagtttttgggtaaggacgacatccaattcgggacgaaggagtcagttgttgatacggcgaaagtactggggtccatgtatgatggtattgaatttcggggctttaaacaaagcacggtcgaagacttagcgacctatagtggtgtgccagtctggaacggattgaccgatgagtggcacccgacgcagattttagcggattttttaacattaaaggaacattttggtcatttaaaagggttgacgttagcgtacgttggtgatggtcgcaataatatggctaatagtttacttgtggcgggagcgatgctcggcatcaatatcgctatcggggccccggtagcgttacagccagccccagcagtggtcgcgttggcccaacagtatgcgcaggcagctgggagcacgatcgtgattacggctgatccgcaacaagccgttactcaggctgatgcgctttatacggatgtctgggtctcaatgggcgagcaggtcgactatggtgagcggatcaagcaactattgccgtttcaaattaatactgcgttactcgcagctactggcaagtcatcgacgattgtcatgcattgcttaccagcactacacgatctaaagacgcagctgggagccaaattaggcgaacagtacggaatgacggcgtttgaaattacggatgatgtcttccagagtaagcaggcggtcgtctttgaagaggccggcaaccggatgccagcaattaaggcggtaatggcggctacattaggtaacttatttattcctaccagcattttcaattagcaagcttgcgggaactactagagcgtgctacgattatattcgctttgtttcaatcaatacgtggttcgtaaccatcccacgttaaaaaaactaggaggaattaagcgaatgacacaatcaaaaattcgaccatggattatcaacgccctagtcgctgcaatgtatgttgtattatgcctaggccccgcagcttttagcttggcatcgggcgcaattcaattccgcgtttctgaagggttgaaccacttagccgtgttcaatcgcaagtatatttggggaattgttgctggcgttattttgtttgacgcttttggtcccggtgcgagtctcctcaacgttctctttggtggcggacaatcattattagccctgctggtattgacgtggttggcccctaagttggagacggtttggcaacggatgttactgaatatcgcgctattcaccgtttcgatgtttatgatcgcactgatgattaccatgatgagtagcggcgtcgctttctggccgacgtatctaacaactgctttatcagagttgattatcatgagtatcactgcgccaattatgtacagcttggatcgggtcttgcactttagcgaccggattcagtagggtgtaactgaatttaatattaagaacgaccggcgtagtatgtgaagatgatttttcgcatattacgccggtctcttatttatttatttaatgaaatgtggttaatttgatttttggttgattattttgaaatggtcaacgtgttttggattgttaactgttcggtagcaatgatcgtcctaattcgaactgttttcagcagtcttaagctggtcgcttttgatctgaaaattcatctcattaaaaaagccccaaggtaaccttggggcaactgtgattattcagcttgtaaatcttccacttcgatgactttaaattgtttgcgattcaagttgtcgataattcgtttgagcttttcactgtcgacattttctggcaaggtaaagagcgtccgataaccgagtgtcccgttttggacgtctagggtcaggcagccggcgattgaagtatatttcgtgataatcttagccatggctgcaaggtcgccgcgttcaccaacggagacaactgttaaaacatagctaccaacgttaacgttccaagattgtgagagcatgtcgagcagacgcgtatgagtgagaatgccatagaaatagccgtgttcatcgagcaccgcaatgtatggcaaatctttgatggagaagaagatattgtagaaggcggagtcgacttgaatcgttttcgtggcatttttaagcagggtcgtcacgggaagcgacatgtcgccgccccgagacttgtgccgatagatgtgcatcttatagatgttaccacggaagatatgaccggtttcatctaagattggaatacagcgaaagccggaatcctccaagacttttaaggcgtcctctaaggtcgcgtccgccgtaatggtgacgaggcgttctttaggctttacgagtgtttttaatagcatagcagttggtcccccagatttattagtttgttttaataaataataccataaaacgaccgcttacacgtatcattatgacatcaaacgacggctaaaagggatgaaaaagccggcctgataacattcagaccggcttggttaaattagatttaaattagaaaacaatgactggtgttccgactggcacggcagcaaaaacttttttcatgacagaaggtggggtgttcacacaaccatgcgagccgtgcttcttgtaccaagtaccaccatattgagtttgccatgaagaatcgtgaattccttcgccagtgtcatcgaacggcatccaataagaaactggttgggaataacttgagccatcgtcattatcacctttaagggtcgcgttcttttccttattccagatgtaccaaacacccgttgttgtagcgtgtttaccgggctttccagtaacgatgtccgttgaaactttgagctttccatcaacgtagacgtacatatgctgattttctttatcaacttcgacgtaggtgttgccgatgtcagtgcccttgttgttatatccggaaccactggtgatgggtgagcgggtaaagtccttgcccttcaaaatttcagtagcaagggctttggcctctgcttcggtcttaatggtccagccataaaacccaccgctgacggatacggtcccacgcgccgtactcttgaactgacgcgtcgtatgataggtatgatacttatcattcaattgcttcacgtaagtcagaacagcgttttggtctaaacttactttgccttgcttatcgattttaatccaactgagaattaagtcgtgaggaatcgtgaatttatgaccgttgatattataggtggccttttcggtagcgtatttcgctgattttactttggccgtctttaaactagcactcgtgctggtaacggtcggagtgacgtaggcgtctttaagggtgatatgactgtcaccattactaattgctttggtgacgaccgtcttaagtttagcttgatctaattcggttccttgaacttctttcttaatctcaacttggttatgttgataaactaacttggcgttttcagtttttgttcgtttggtttgattggcagtcgtggtgattttttgtagtagggttttcaaatcagtgtgattgatggttagttgtccaaccgctgagctatcatcagcctgagccgattgcaatagtgcaaggggccaacgccagtagttttgtttggtcactaatttggttaaatcttttttagtattgattgtaataccggctgatttgctggtaaatgagtactttgtttggccgttttcaataattcgataagtgcgatgttctaaagcgcgattaactttcggtgctgcttgagcggcggttttaccactgacgtcaacaccagcgaccgacgtattactgaggaacgtttgttgatgttgccagattaagctcgtggcaacatatccgatgacgaggagaccgaggatactgcccccaatcataagtccacgtttatgtttcataattaagttggtcctccatatattcgtaatattctcaccttataacagaagtgagatgagtgcaaacttcaaggccggtaatcgtgataagaaagttttaaaaatagcctttagtgcgtgttgcgctttaatgaatcgctaaggtaccctcaagcaaataaaaaaacgcccgtctgctatagacgagcgttcatcatacatttaatcgtatgaaatgattatttattttctaattcagctaaaccgtcgttaagcacttttttcaaagttgcggcggaatcttgcatcttcttgagttcgtcagctgaaagtggtgattcgatgatttgtttcaaaccagttccaccaatcacagccggagtcccgatataaatgtcgtttaagccgtattggccgtccatgtaggcacctactggtaaaacggcattttcatcacgtaaaatggctttggaaatccgcattaaagcagtcccgataccgtagaacgtggcacccttcaagttgatgatgtcgtaagctttgttacgaacaccgtcttctaacttggctaaatcttcgtcagaaacgccttgttccttagcgacatcgcgaactggacgtgtcccgatggttgcagttgagtaagcagcaaattcagaatcaccgtgttcacccatgatgtaagcatcaacggaacgaggatcaacattgaattgtttgcctaacgcaacgcgtaaacgtgaagagtctaaggaagtccctgaaccaatgacacgatcctttgggaaacctgagaatttccaagtagcgtaagttaagatgtcaacagggttagcagcaactaagaagatgccgtcaaagccggagtcaacaactggtttgacaatggatgataggatatttaaattcttgttaactaagtctaaacgtgattcaccaggcttttgaggcgcaccggctgtaataacaactaagtcagcgtccttacaatctgaatattcgcctgagtaaatcttcttgggagcggtgaatgcttgggcgtcttcaagatcaagggcgtcaccctttgtccgatctttaacaacatcgacaattacaaattcttcagcaattccttgttgtgccatggcaaaagcgtaactagaaccaacagcgccgtcgccgactaacacaactttttgatgatttggcatgcttgacaaaataagtcatcctctcgtagtgaaaatttagtttttacggttaaagtataccatgtttgtgcaaaataagtgttagattgagcatgcttttaatacaattattaacaatgtccgcaaaaccctttggcgggcgtcaataagccctttgtggtatacttatcgcacttaataaacgctaacttttgaacacttgactggcgggcgcgtcggtcacggtgtgagtagtggtgccaatacgacttaggtggtatcgttactcagagttgccgaatcgggtcgattaccggttcggcctgttttggtatgcaaagtaataggagaagataaaattatgaaaatgatcgttgggttaggcaacattgggcggcaatatgcccagacacgtcataatgttggttttatgattgtggacgaattagctagcaaactaaacgttacgtttcaaacgagtaaatttgaagcacaggtggcaacggcttttcaagacggtgagaagattttactggtgaaacccgccacttatatgaatgattctggacgagcggtgggaccgttgatgagctattacaatgttgatcctgctgatttgctcgttatacatgatgatttagatttgccattaggaaaagtacgcctcaaacaaaagggatcggcgggtggtcataatggcatcaagagcattattagtcatgttggcgatcagcacttcaagcgcgttaaagttggtattgaccatcctcagaagatgagtgttgttgattacgtgttggggaaatttacgccagccgaagtggcgaagtttgacgatgctaagattacggcgctagcggcggtcgaagcttggttagcaaatgatgattttgcggcagttatgaatcaatataactagcccgggaggaaacgacagaatggatattgaaacgattgttgagcaaacgcccgactttcaaacaattttagcaggtatcagcccgcgtagtcggcaactaatcaccggattgaacggttcggcacgaacggtttatttaagcgcgctatttcaccaattaacgcattcattactgatcgtgaccgataacggttttcacgcgagtcagctagtggatgatttaacgagtctcttagatgaagaccaagtttttttattcccagctgaagaaatgattgcgacggaggttgcgacaagttcaccagagtcacgagcgcaacgggtccaggctttaaacgccttattgcgtgacagtccggcagtgatcgtgacctcggttgcaggtgcccggcggttcttgccgcccgtcgcacaatttcaagcagccacgttaccggtagccgttggtcaagatattgatttggaagacttgcagcggcaactacacgacatgggttacgttaaggaaaagttagtcgcacgcccaggagattttgcggtacggggctcaatcgtggatatttacccgttagatgcggactaccctttacgactggacttctttgatactgaagttgatacactgaagtattttgacccgggaacgcaacgttcggtggaaaacttggatgagtatacaattttgccagctaccgactttatcctgacaacagctatgctgcaggccggggcacagcgtcttaaaacggcgattgcggctgaaagtaagaaactcaagccagccgaacgccagactttggccgataatttagcacaacctttagctgacatggaaaaaggaattatcggaaacgatttattattatatggcgattatttatacgaccggaaaacgagtatttttgactatgtggccgctgacgggctcgttatcttcgaagaatattcgcgtttgcttgatagtgagcagcagttattaacgcaagaagctgactgggttacggaccaattggcacatcaccgggtgctggcaactgcgagttacggcaatgatattcgggatttgctccgggatgaccaacatgcacaactcttgatttcgctgtttcaaaagggcatcggtaacgtcaaactagcgcaagtcactaacgtgcgcacacgcccgatgcaggaattttttgggcagctcccagcgttgaagaccgaactggatcggtggcataagcttaaacagacggtggtcttgatggtatcagaggctgagcgtctgacaaaggtcagtgatacgcttgatgattttgaaattgaagcggtcatgactaaggccactaatttacaaccgggggcggttcaaatcgtgcaaggtagcttgcaaaatggatttgagtttccggatggtaaattagtcatcgtaaccgagcaagaaatgttcaagaaggtggctaagaagcgtccacgtcgtcagaccttggctaatgccgaacggttgaagagttatacggatctcaaacccggcgattacgtcgtgcacgtcaatcacgggatcggaaagtacgttggtatggagacgctggaagttgatggtgtccatcaagactacattacgattgcgtatcaaaataatgcgaagatctttattcccgtgacccagttaaacctagttcaaaagtacgtttcgtcagaatcaaagacgccacgcatcaataagttgggtggtaccgaatggacgaaagcgaagcgcaaagtcgcggcgaaaattgaagatatcgcggatgaactagtcgacctgtatgccaagcgagaggcagagaaaggttacgcctttccaccggacgatagttatcaagatgatttcgataacgattttccgtacccagagacgccggatcaaattcgtagtattaatgaaatcaagcatgatatggaacgaccgaaaccgatggaccgcctattggtcggcgatgttggttatggaaagacggaagtcgcgttgcgggccgcgtttaaggcgattgaggccggcaaacaagtggcctttctagtgccaacgaccattttagcccagcaacattatgaaacgatgctgaatcggtttgaaggctacccgattaacgttggcatgctgtcacgattcagaacaactaaggaaatgaaagagacggtccaacagttaaagagtggtgaaattgacatcgtggttggtacgcaccgcttactgtctaaggacgtcgcgtttgctgatctgggcctgctcattattgatgaggaacaacggtttggggtcaagcacaaggaacgactgaaggccttgaaggctagtgtggatgtcttgacgttaacggcaacgccgattccgcgaacattacacatgtcgatgctcggtgtacgggacttatcagtgattgagacgccgccaacgaaccgttatccgatccaaacatacgtcatggaacaaaattttggcgtcattaaagagggaattgaacgagaaatgcaacgtaatgggcaggtcttttatttgcataaccgggttcatgatattgataaagtcgttacacagatcaaagacttggttcccgacgcggcggtggcccatattgatggtcagatgcctgagtcacaactcgaagggattctctatgatttcattcggggtgagtacgatgtgttagtgacaacgacgatcattgagaccggggttgatattccaaacgtcaacaccttatttgtggaaaatgctgaccggatgggactgtcacagctataccagttgcgtggccggattggtcggagtagtcgggtcgcctatgcttactttacttatcagcaaaataaagttttgacagaagttggtgagaaacggttacaggccatcaaggactttacggaacttggatctggctttaaaattgcgatgcgcgacttgtcgattcggggtgctggtaacttgttaggtaagcaacagcacggctttattgactcagttggttatgacctctatacccagatgttgtcagaagcagtggcgaagaagcgtggtcaggcggctaaagttaagaccgatgccacggtcgaacttggaatcgaagcctacttgccgaccagctatattgaagatgaacggcaaaagatcgaaatttataaacggattcgccagctggagaataatgatcagtacatggaagttcaggatgatttaatggatcggtttggtgattatccggtagaagtcgctggactattagcagtaggtaagctgaagttactggcggatgacgcgctgattgagaagattcagcgtgacgatagtgagctacacctaacgttatccaaacaagggacggctaagctagatactaaagatatttttaaggccttggcaaaaacaaaattaaaagcgacagttggaattgatgatgataaaatgaaggttaaattagtcattcagccaaagatgcaacaggatgagtggctggcgcaattaacacagtttgtcgaacaactgagtttgatcttagccgaagacgatgtcgctagtgcgtcttagctcggtagttgttgttatgaagcatggttgcacggggtgggttaagcgctatcgagtggaaccaatggcaaatagcaggaattatcgtctgatggggcgttgtcctggctagtcagggcacggctcaaatgaattagtatgagacaccgagttgctcggtagaagggatttgttatgccaaaggatcacttgaacaccgtgttcaaaggtgcgttaattttatcgatatcatcattagtcgctaagattttaagcgcggtataccggattcccttacagaacatggttggtaatacgggattttacgtttatcagcagatttatccgctgtacggcattggcatgacctttgcattaaatggatttccaaattttatttctaagttagtggcagaacagccagacgaaacgagtaagtcgctgattgcacggcgggcgtttcatatcttatccggattatcgttggtcgtctttttcggcttgcagcttggtgcaacgtggattgcggcccacatgggtgacgttaatctagcaccaatcattagtgccgtggcttggatgtttgtctttatgccatggttagcaaccggccgtggttactatcaaggaaaatttttgatgggaccgaccgcagtgtcccaactgatcgaacaggtcgtacgggtcgcaattatcatcatggctgcatatttcagtgtccgtctcggttgggataattatcggatgggaacgtgggcaatgagttcagcgccactagctgcaatctgttcatcactgatttttactgcttttggtctacgctatttattggcgcccgcacccgcaccgacccacccgttacctagttatcgcaaattaaccaaaagatttgtaattgaaggtgggacgctgtgtcttgtcgccgctgtcgttatcttactgcaattagtggattcatttacggttatgcggggcttggtgcatcaaggtcagttaccagaagtagccaaggcactaaaaggggtctacgatcgtggtcaacctttggttcagttagggttggtggtggcgacggccttttcagcaacgttattgcctgctttgacggatgcgttagccaagcgtcaaccgattgaattcaagcgccagacacaggcgatggttcacgttagtttagcattatcaatggcagcgacggtcggtctagttgcgttgatgccacaaatcaatcgcttgttatttggttcattagaaggaacaacggcattgcgaatctatattattagtattttatttgcagcgttgattacgacgtatacaagtgtgttacagagtttgaacgaatatacggccatgatcattggcatcattgctggattagcgacaaaagtgctggctaattacatcttcgtggtccactatggcatcaacggtgccagtgcggtgaccgtattgagcttggccgtgatgtttgcggtcatgtggttaggttcgccggaagacttgcagcaggtgctattagagagtggttatttgataaaattgctcgcattaagtgccgtaatgggtatcgtggtgatccttagttgtcatcaaatcaccgccttagtaggtccgatactagcgaatacgcgtggaatggctggaattataacggtgattggggtgctaatcggtgtgctggtgtttgttgccggggccgtctatgcccgattattcacgattcgcgagtggttagtgttgccatatggaaagcggctaattaaggccgttgcaaaaggaaaggaacatcattcatgagtatgcgtttagataagtttttaaaggtttcacgaatcatcaagcggcgctctgttgctaaagaaatcgccgataaggggcggattcaaattaacggtaaggtagcgaaatcttccagtaatgttagcgttgatgatgaactaattattagttttggaaataagacattaacagtcaaagtgacgcagttattggaaacaactaagaaaaatgatgccgagctgatgtatgacatcatcagcgaagactacaaaacggattatcgccaaccatttagtgattaggtcggtgtatccgttcatcgaaatggtcgtaaacgttgacttaatcagcatgatgtcgtttacaccggccgatgaagttgttataatttaggcaacccaatttgaaaggactggaccaacatgacgaacgggtcacgtaacaaaatcaagcagttagataatgattatattcgtcaagttgccaccgacgagcatgggcaagcccagcgtgttgcacaagtacggcggcgacggtttattttgattgttgcggtgttcggagcattgatactattctttggttttcagttgattaatacgcggtccaatctgcaccaggtaaaccgtcaagttgcgaccagtcaagttaaattaaaaaaggtgcagcaaaaaaataatcaacttgagagtcagatcaaacagttgaataataaggattacttacaaaagttattacgttcaaagtatgattatacgaagagtggcgaaacggtctacagcttaccaaatgataatgctgccgatgtaactgccaactaatcggggttgtggtctgctttatatgagtagaccactttttattaattgcttaaatgtataactcaacgtttcacaaagtatgctatactaaaaccattatttcataggaggaacaactttttttatggcaattgaagtaggtacaaaagtcactggtaaggtatctgggattactaattttggtgcatttgtaaacttgggtaataatcaaacggggctagtacacatcagtgaggtttccgatggctttgtaaaggacattcatgatgtcttgagcgtgggcgacgatgttacagtcaaagtgttatccgttggtgatgacggtaagattggcttgtcaatccgtaaagcggttgacaaacctcaaggtgaacatgaacatcatggcaaccatcagggtggcaaccggccaaacaatcatcaaggtaacaaccatggtcatggtgaacgtcaaagcaatggcaatcatcacgatcggtcaaataatttccatagtcgtgggggaaatggcggcggtcgttaccaatcacgacaacatgaacctaagaagcaggactttgattcattgatgtctggcttcttaaaagatagcgaggatcggctagcaaccttaaagcgtaatactgaaggtaagcgtggtggccgtggtggtcgtcgtagctaaacctagtgacttgccattaatctagttaaattttgaagcacggtgcggctatttagagtcacgaccgtgctttttttattgaaaattgccgattgttcaaggtcagtcagcgagacacgttggaaacggtgtgagttaccgtaaacttgcttggctagttcatcttatgctatccagtcggaataatgttcaaataggtgacaaacgaccagccaactaatcggcaagttttaacaataaataaatccaatgtatttataatgaagttagatgggaggttaagatgacaccaattcaaaagttcaatcggcaattagctgcagccaaactgttatcaccacagcaaacagtggtggtagcggtgtcgactggggtcgattcaatggtattgttgcatttgttgcaacgattgccagcagcggaacggccacgggtagtggtggctcatgttaatcatcatttacgcgaacaaagtcaaatggaagcggactacttgcgacaatattgccagcagcaaaacttgaagctagtcatggccgattggctacccgcggcacatcccaagagtggtattgaagcagctgggcgtcagtttcggtaccatgtttttgctaaggtgatgcgggaaaatcgtgcaacggcagttttgactgcgcaccacgccaatgatcaagtcgaaacgtatctgatgaagcttgcgcgtggtggcgacatctcacaattgacaggaatcgcaactagtcggccctttgcaacgggccgattaattcggccgttgttgacgtggtcgaaagatcagctacgaaactatgctgccgagcagcatgtcgtttattttgaagacgttactaatcaagatgtggccttgacccgtaatcggattcggcaccgtgtcgtgccagaacttatgaaggttaatccccagttattaaagcatgtggccgattaccagcaacagttgacaacgctgttgatggctaaaaagcaaatggtcacggtattactgtcgcaggtcgtaacggccacaggggcgttggttgttgatcagtggggcgcactcccgagccagtggcagttagccgtttttgcgacgtggctcgagcagcagacgcaacaactattcaccgagtcgaagttacaaccgctggtctcgtggggacaacggacgcggcctgccacgagtagattaacggtaaacgcggcctgggagttgtaccgtaacgctggtatcattgaagctttgccaataaaaaaaaggggtaaaaagttaatgccccgtgaaaaaattatggtagacttaaaccaatggcagaaaattactgcaacccaaacggtgggaatctttacgcgggtgccaaatgttgtcagtcagccattttggttaacagaagccgattggccgctagtgtggcggccgtggcaagctggtgatcgaatcgttctcaagggcggtggtcatcagctggtacgtcgactgctgattgatcgaaaagttccggctgaacggcgtgaacaggtgcaagtgttagtgaatgctcaagggaacgttctgtgggtggtcggtcataagtttagctatcgtacgactggtacccagacagtatttttagccttaaaacacgagagttgaaaggagtacatctgaaacgatgaacaacgacattgaacgagtactttatagtcgcgaggatatccatcaggttgcacaaaaattaggaaaagaactcacaactgcatatgctggtaagaacccattaattatttgcgtactcaagggtgccgttttatttaccacggacattattcgtgaaatggatatttacgcggatcttgattttattaatttatcaagttacggtaatgaaacgatctctagtggtgaggttcaactaacgaaggacttagatgctgatgtgacgggtcgtgatgtgttagtcattgaagacatcattgataccgggcggacgttgaagttcttgatcgatttgttgaagcggcgcgatgtgaactcagttaaggtctgcacgttattggataaaccagctggtcgactcgttgatattaaggcagattatattggttttgaagtaccgaatgagtttgtggtcggttacggtcttgactatgcagaacgctatcggaacttgccgtacgttgggattttaaaacctgcgatttacgagcataaataattggtcaatgatagtcaaatgtgctattatttagactatcgaagtactgtatataaaagtttcgatgaaggaggcacatatgaacaatcgacgcaatggactctttcgtaatagcttattttacattttgatgtttctgagcttgatgggaattatctactttttctttggcggtaattccggctcacaaacgcaaaatattcgttatagcgaatttgtcaaacaattagataagaataacgttaaaaacgttagtatccagcctagtggcggcgtctacaaggtaactggttcataccggaaagcacggacgacttcttctgcaaacgcccttggtatcaagagcgcatctacaaagacgacgtcattttcaacaacgatgttggaaaacaactccacggttgaccaagtttctaagttggcggctaagcatgacgtcaaggttacggctaaggccgaagaatctagcggcatctgggtcacgttattaatgtacatcgcgccagtcatcctgatgttattcctcttctatatgatgatgggacaagcaggacaaggcggcgggaacaaccgggttatgaactttggtaagaccaaagcaaaaccagctgatagtaagcaaaataaggttcgtttctcagatgttgccggtgaagaagaagaaaagcaagaattggtcgaagttgtcgaattcttgaaagatccgcggaagttcgtgtccttaggtgcacggatcccatctggggtactcctcgaggggcctcctggtactggtaaaacgttgcttgctaaagcggttgccggtgaagctggtgtcccattcttctcaatctctggttctgacttcgtcgaaatgttcgtcggggttggtgctagccgggttcgggacttattcgaacaagctaagaagaacgccccatctatcatctttattgatgaaattgatgcggttggtcggcaacgtggcaatggtatgggcggcggtcatgatgaacgtgaacaaaccctgaaccaattgttagttgaaatggatggttttacaggtaatgaaggtgtcatcgtcatggcggcgacaaaccgttctgatgtacttgatcctgccttacttcgtccaggtcgtttcgaccggaagatcttagttggtcgtccagacgttaagggtcgggaagccatcttaaaagtccatgctaagaataagccattagcagctgacgttgatttgaaggaaattgccaagcaaacacctggattcgtgggtgccgatttggaaaacttattgaacgaagcggccttgttagctgcccgtcgtaataagaagcaagttgacgctgcggatctcgatgaagcagaagatcgggtcattgccggacctgctaagcatgatcgcgttgtgaataagcatgaacgggaaaccgtggcttatcacgaagctggtcatacgattgttggattggtcttgaatgatgcacgggtcgttcataaagtaacgatcgtgccacggggtcgtgctggcggttatgccatcatgttaccacgtgaagatcagatgttgatgtcgaaacgtgatgcgaaggaacaaatggctggtttaatgggtggtcgtgctgctgaagaaattatctttggggcgcaatcatcaggtgcttctaatgactttgaacaggcaacgcaaattgcccgggcaatggttactcaatatgggatgagtgaaaagcttggtcctgttgagttagaaaatgccaaccaacaagcagcttaccaacagggtatgggtgcgagtgccttttcacaacatacggcacaattgatcgatgatgaagtccggcgtttgagccaagaagcgcatcaaactgctacggatattatcgagtcacaccgtgaacagcataagttaattgcggaagccttattgaagtacgaaacattggatgaaaagcaaattctcagtctgtttaagactggtaagatgcctgaaaaggatagtaatgaatttccaagtgagaaagcagctaccttcgaagaatccaaacgtgaattggaacgtcgcgaagctgaaaagcacgcgcaaaaccaaagtgcggatgataagcaagcagactcagctgacactacgactaatgtgagtgttgctgaaccaagtttcccaagtgaatcggatgctagttcagaagttagtgctgacagtagtgtcaattcaacagctaattcagccactgaatcagctaccgacagtgatgtcgcaacttcagccaccggtttaccaaatgctgaaagtgccacaccatcatcgcaggatgatactaattcgcaagcatagtattgaataaagtaaaatgaaggagctgggactttgtctcggctccttttatgcgttatgatatttcaggaaaataaatcaattgtgttaattcggttatgagcgtcgggtcgcaattaaagacggattgagataggagtatgattaaatggcagattatttagtaaaaagcgtcgcgggtaatgagatgtttcgagcgtacgcagttagcgcaacgggcgtggttgctgaagcccaacgccgacatgatacctggagtgcagcatcagcagcgttaggccgcagcttggttggtacgttattattagcatcatcggttttaaagggtgaagaacaaatgaccgttaaaatcaacgggaacggtcctgttggtggtatcgttgttgatggcaatgctaaaggtacggtcaaggggtatttacagcacccccatgtgcacttgcctttgaatgataagcataagatcgatgtgaaggcggctgttggaactgatggctttttatctgtgactaaggatcagggggttggggatccattcaccggaacggttgcgttagtttctggtgaattaggcgaagactttacgtattacttagcacagtccgaacagattccatcagctgttggcttgtcggtgtttgtaaatgacgacaattcgattggagttgctggtggctttttggtgcaagtattgccaaatgcgacggatgaagccatcagctcgctagaaaacaagctcaaagacatgccgttagtctcccaattgatgcgtgatggtaagtcaccagaagatattttggatttgttatttgatggtgacgttaaggtattagataaaatgccagttaagtttgaatgcgattgttctaaagaacgatttgccgaagcactaatggctttgcctaagcatgaggttcaagcaatgattgatgaagatcatggtgccacggcagtttgtcatttttgtggggaccagtatcagttcagtgaacgcgaactagaagcagtgctctcacggtccaagggtgacgcttaatgaatcaagagtggcagatcggtgatgtgacgattcccaatcgtgtcgtagtggcaccgatggccggcgtgactaacgcggcctttcgagtaatctgcaaggattttggtgcggggttagtcgtttgtgagatgatttctgatcgcgggatcatgtatcataatcgtaagaccctggaaatgatgtttgttgatccaaaagaacatccaatgagtattcaaatctttggtggttcgaaagcaacactggttcaagccgcccagtttgtcgatcagcagaccaatgctgatattattgatattaatatgggctgtccggtgaataaagtggttaagactgatgcgggcgctaagtggcttttaagtccagataaagtctatgagatggtcgcggctgtgactgctgcggttaataaaccagtgacggtcaagatgcgaactggttgggacgcagagcacgtatatgccgtcgagaatgcgcgggctgccgaacgagctggtgcagctgccgttgcaatgcatggacggactcgtaagcagatgtaccaaggccatgctgattgggacgtgttaaaacgggtggcggatgccctcacgattccattgatgggtaatggtgacgttcagacacctcaagatgctgcgcggatgcttgatgaagtcggggccgatgccgtcatgattggccgggcggtagaaggtaatccgtggatgcttacccagacagtacactatttagcaaccggggagttactaacgccacccacaccgatggctaagatgcaaacggcaatggaacatttgcagcggttagtggttttaaaaggtgagcggggcggctgtcatgaattccgtgaacaagcgccgtactatctaaaaggcatcccaaggtcggcacggaccaaagtggctttaatggaggcaagctcgttagcagaaatgatgcgcattttaacgcagtttcaggagcagacggcaacttatttggctagtcacgcggtaaagtgaataattaacttgcattttggcggcgtgattgtcaaaattaacatgtagtgattgtttaggtacggaataaatctgtacgctaactagaaatggaggaacactagtggcacgacaagaacagacgatgaacgaccaactgaaggttcgtcgcgaaaaaatggatgaactgcgtgaagaggggattgatccctttggtcaccggttcgaacggactgatttagcccaggacttgcaagacaagtatggggatatggataaggacgagctagacgctaaacaagtggtggcaaccattgctggacggatgctagctaagcgtggtaagggtaaagtcggttttgctgatatctgggatcgctcaggtaagatgcagttatacattcgtaaagatgtagtcggcgaagatacttaccatatcttcaagcgttctgatattggtgatttccttggaattaccggccaagtttttaagacggactttggcgaattaacgattaaagtaactggtttaacgttcttatcaaaggcgttacgaccattgccagataagttccatgggttacagaatgtggaacagatctatcgccaacggtatttggacttgatctctaaccgcgatagctttgatcgtttcttgaagcggacgaagattatttcagcgattcggcatcatttagacgatcaaggcttcacagaagttgagacgccaatgttgcataatcaagctggtggtgcggcagcacggccatttgtgactcaccacaatgcgttgaacattgatctctacttacgaattgcgttggaattacatttgaagcgcctgatcgttggtggcatggaaaaggtttatgagattggtcgggttttccgtaatgaagggatggaccgtgaacataatcctgaatttaccatgatggaaacttatgtcgcctatttcgacttccatgatgtaatggctgagacggaaggtatttttaaagccgcagcgcaagccgtaactgacgatggcattgtcacttatcatgatcaaaaagttgatttcaatcaaccatttaagcaaattcacatggtcgatgcgattaaagaaaagactgggattgatttctggcaaccaatgtcaattgaagatgcacaaaaattggcggatgaacatcacgtgaagtatgaaccatactggaaagttggtcatatcattaatgcgttctttgaagaatttgttgaagacacgttgaatgaaccaacctttgtttatggtcatccagttgaaatttcgccattagctaagaagaatgaagaagatccacggtttactgatcgttttgaactcttcatcttaggtaatgaatacgccaatgcgttcagtgaattgaatgatccaattgaccaacggcaacgtttcgaagctcaggctgcggaacggactgctggtaacgacgaagctgaacatattgatgaagactttgtcgaggcgttggaatacgggatgccgcctactggtgggttaggtatcgggattgatcggttggttatgttaatgacggatgcggactcgattcgtgatgtcttacttttcccaacgatgcgtccagaagaagataaataattagatttaaaacggcagttagcttaggttttcctaagctaactgccgtttttgttgggtcagattgagtaactttagttcggaaagcgatttattgaaaaaaagttagattatttttacccgaacattgttgagacatttggaggctaaacttaagtaaaagcggattttatggtggtggtaggtaggatttgaagtcaattaacatgattatggttttaaataccgtatattatcaaagtggattgattaacatgatattattgactggttatttttgcattttagggcttgcaatttatcaggataattggtaaattagtatacgttgttgaggcgcacaaagcggttagccgcttgcttccaacgaaaattaattataaaaagttgttgacaagatgttgataacttgatatgatgattaagttgcgttgaggtaatcaacgaacgatttagacctttgaaaactgaacaaagtttcgacgaatcaaatgtgtagggtctcttgattttgaatcaagagcaaaacatttgcgaagtcaattcgctagcaaataaattttagtacaacattaaatgagctttttagaactcatcattaatttgagagtttgatcctggctcaggacgaacgctggcggcgtgcctaatacatgcaagtcgaacgaactctggtattgattggtgcttgcatcatgatttacatttgagtgagtggcgaactggtgagtaacacgtgggaaacctgcccagaagcgggggataacacctggaaacagatgctaataccgcataacaacttggaccgcatggtccgagcttgaaagatggctttggctatcacttttggatggtcccgcggcgtattagctagatggtggggtaacggctcaccatggcaatgatacgtagccgacctgagagggtaatcggccacattgggactgagacacggcccaaactcctacgggaggcagcagtagggaatcttccacaatggacgaaagtctgatggagcaacgccgcgtgagtgaagaagggtttcggctcgtaaaactctgttgttaaagaagaacatatctgagagtaactgttcaggtattgacggtatttaaccagaaagccacggctaactacgtgccagcagccgcggtaatacgtaggtggcaagcgttgtccggatttattgggcgtaaagcgagcgcaggcggttttttaagtctgatgtgaaagccttcggctcaaccgaagaagtgcatcggaaactgggaaacttgagtgcagaagaggacagtggaactccatgtgtagcggtgaaatgcgtagatatatggaagaacaccagtggcgaaggcggctgtctggtctgtaactgacgctgaggctcgaaagtatgggtagcaaacaggattagataccctggtagtccataccgtaaacgatgaatgctaagtgttggagggtttccgcccttcagtgctgcagctaacgcattaagcattccgcctggggagtacggccgcaaggctgaaactcaaaggaattgacgggggcccgcacaagcggtggagcatgtggtttaattcgaagctacgcgaagaaccttaccaggtcttgacatactatgcaaatctaagagattagacgttcccttcggggacatggatacaggtggtgcatggttgtcgtcagctcgtgtcgtgagatgttgggttaagtcccgcaacgagcgcaacccttattatcagttgccagcattaagttgggcactctggtgagactgccggtgacaaaccggaggaaggtggggatgacgtcaaatcatcatgccccttatgacctgggctacacacgtgctacaatggatggtacaacgagttgcgaactcgcgagagtaagctaatctcttaaagccattctcagttcggattgtaggctgcaactcgcctacatgaagtcggaatcgctagtaatcgcggatcagcatgccgcggtgaatacgttcccgggccttgtacacaccgcccgtcacaccatgagagtttgtaacacccaaagtcggtggggtaaccttttaggaaccagccgcctaaggtgggacagatgattagggtgaagtcgtaacaaggtagccgtaggagaacctgcggctggatcacctcctttctaaggaatattacggaaacctacacattcttcgaaactttgtttagttttgagaggtctaactctcaatttaataagcgttttttgggcctatagctcagctggtttagagcgcacgcctgataagcgtgaggtcgatggttcaagtccatttaggcccattggaaccgaaccagttggttccataagttgaatacctcatggggaattagctcagctgggagagcacctgctttgcaagcagggggtcagcggttcgatcccgctattctccattgacgacgttagtcgtcattgaaacttgttctttgaaaactagataatatcaaatatattttttcataatgaaaccgagaacaccgcgttttttgagttttttattgaagtttaattatcgctaaactcattaatcgcatttaccgttaggtaaatgaggttaagttaacaagggcgcatggtgaatgccttggcactaggagccgatgaaggacgggactaacaccgatatgcttcggggagctgtacgtaagctatgatccggagatttccgaatggggcaacccagcagttttaatcaactgttaccactagatgaattcatagtctagttggaggtaaacgctgtgaactgaaacatctcattagcagcaggaatataaagaaatttcgattccctaagtagcggcgagcgaacggggaacagcccaaaccaaagtgcttgcactttggggttgtaggactgaacatttgagttaccaaagaacttgatagtcgaaggatttgggaaaatccgccatagatggtgatagcccagtagattaaatcaaattctctcagttcaggatcctgagtacggcggaacacgtgaaattccgtcggaatccgggaggaccatctcccaaggctaaatactacctagtgaccgatagtgaaccagtaccgtgagggaaaggtgaaaagcaccccgggaggggagtgaaatagttcctgaaaccatgtgcctacaataagtcagagcgcgttaatgcgtgatggcgtgccttttgtagaatgaaccggcgagttatgatcccgtgcaaggttaagactaaaaagtcggagccgtagcgaaagcgagtctgaaatgggcgttttgagtacgaggttatagacccgaaaccaggtgacctatccatgtccaggttgaaggtgcggtaaaacgcactggaggaccgaacccgtgtaagttgaaaattgctgggatgaggtgtggatagcggtgaaattccaaacgaacttggagatagctggttctctccgaaatagctttagggctagcctcggaattaggatcatggaggtagagcactatttggactaggggcccgtcttgggttactgaattcagataaactccgaatgccattgattcatatccgggagtcagacgatgagtgataagatccaccgtcgaaaggggaacagcccagaccatcagttaaggtccctaaatgtatgctaagtggaaaaggatgtggagttgcatagacaactaggatgttggctcagaagcagccaccatttaaagagtgcgtaatagctcactagtcgagtgatcctgcgccgaaaatgtaccggggctaagcatactaccgaaaccatggatgcgactattaggtcgcgtgataggagagcgttctaagggcggtgaagcaagatcgtgaggacttgtggagcgcttagaagtgagaatgccggtatgagtagcgaaagataggtgagaatcctatccaccgaatgactaaggtttcctggggaaggctcgtcctcccagggttagtcgggacctaagtcgaggccgagaggcgtagacgatggataacaggttgagattcctgtactagttaagtgcgtttgagcaatggagggacgcaggaggctaagatgtgcattctgttggattagaatgtccaagcagtaagtcttgtgaagagtcaaatgcttttcactttaaggacaagctgtgatggggagcgaaatttagtagcgaagcgtctgatgtcacactgccgagaaaagcttctagtgagtacttaactacccgtaccgcaaaccgacacaggtagtcgaggagagaatcctaaggtgagcgagtgaactctcgttaaggaactcggcaaaatgaccccgtaacttcgggagaaggggtgctgatcgcaagatcagccgcagtgaataggcccaggcgactgtttatcaaaaacacaggtctctgcaaaatcgtaagatgacgtataggggctgacgcctgcccggtgctggaaggttaaaaggatgggttagcttcggcgaagctcagaattgaagccccagtaaacggcggccgtaactataacggtcctaaggtagcgaaattccttgtcgggtaagttccgacccgcacgaaaggcgtaacgatctgggcactgtctcaacgagagactcggtgaaattatattgtccgtgaagatgcggactacccgcgacaggacggaaagaccccatggagctttactgtagcttgatattgagtgtttgtacagcttgtacaggataggtaggagccatagaaaccggaacgctagtttcggtggaggcgttggtgggatactaccctcgctgtatgaccactctaacccgcaccactaatcgtggtgggagacagtgtcaggtgggcagtttgactggggcggtcgcctcctaaaaagtaacggaggcgcccaaaggttccctcagaatggttggaaatcattcgcagagtgtaaaggcacaagggagcttgactgcgagacagacaggtcgagcagggacgaaagtcgggcttagtgatccggtggtaccgtatggaagggccatcgctcaacggataaaagctaccctggggataacaggcttatctcccccaagagtccacatcgacggggaggtttggcacctcgatgtcggctcatcgcatcctggggctgtagtcggtcccaagggttgggctgttcgcccattaaagcggtacgcgagctgggttcagaacgtcgtgagacagttcggtccctatccgtcgcgggcgtaggaaatttgagaggacctgtccttagtacgagaggaccgggatggacatacctctggtgtaccagttgtgccgccaggcgcatcgctgggtagctacgtatggatgtgataaacgctgaaagcatctaagtgtgaaacacacctcgagatgagatttcccattcctttatggaagtaagacccctgaaagatgatcaggtagataggttagaagtggcagtgcggtgacgcatgaagcggactaatactaatcggtcgaggacttaaccaagtaattggtgttccggttcatatgaagatatttgatattgtctagttttgagagcacaagtttctcaatagtgtggtgacgatggcgagaaggatacacctgttcccatgtcgaacacagaagttaagcttcttagcgccgagagtagttgggggatcgctccctgcgagggtaggacgttgccatgcgattattccgacatagctcagttggtagagcgcttgactgttaatcaagatgtcgacggttcgagcccgcctgtcggagtgacatagatgttggcaattgtgttaacatctatttttatatcatgccggcttagctcagttggtagagcatcggtatcgtaaaccgagggtcatcagttcgactctggtagccggcacttgtgaggtgggacgtggttctcgcctttttatttttaaatagacataaaatgattggcagctttgcgcaaacgcaaagctgcttttttgatataagaatgttagctatttgaatgccgaagtatcaaaatgatcgtaagggcttagtaggatgatgcctattgtcgccactgctttttaggtatgcttaacatatcaatcttgcggtttattataattagtcgcaataactgtaaattacatgctgcgaacaatcatagccattttaatagcggtactttattgttgataatttcagttttgttttttgtttaattagatttttaataccaattgcgtattttcagcatttgaatgctattaattattttatattaaattagaatttagtgttaattttagaaagctaaaagccttataaaatgtcctatcaactagtttttggtgctataaaaggatttaagactatttatgtatggtggatattaatttaattaatggttattagattagaaaacggttagtgctattgttgattaagattaaggctagtataatagttattatgtttaattaagaaacaaaacttgttacttttaaacgaaatacaaactggttaagaagtttggaggaatctctattggataaggaacaaaagctggatcggtcgttctttggccaaccccgtggcttacggacgttgttcttcactgaaatgtgggaacgattcagttactacgggatgcgtgcgctactgatctattacatgtactacagtgtcgctaaaggtggtcttggatttgaccaagtcaccgcagcatccattatgtcaatctattcggccttagtttacgtttctagtgtcctcggtggctttctaagtgaccgtgtctggggtagccgtaagaccgtctttattggtggggtcttcatcatgttaggccacatcgttttatcaacgccatttggagttggtgcactatttgtttcaatcgcacttattgtcattgggactgggttattaaagccaaacgtctctgacatggttggtcaattgtatacagtggaagatacacgtcgggatgcaggttttagtattttcgtcttcgggattaacttaggttcattggttgcaccagccttagttggtcggatcggcttaaatgttaacttccacttaggcttctccttagctgcgattgggatgttctttggtctattgcaatactactttgatggtaagaagaatttaagttctgctagcctctatccaactgatccattagaacccggtgatttgaaaaaaatcatgcggtggacaatcttaggaatcgttgggattgggttgattctactattaatgcaattaatgaatgctcttacgttagcaaatgttattagtttaattagtacgcttgttatcttgacaccaatcgtttactttattttgatgttaacgtctgacaagactaatgcaacagaacgttcacgtgttcgggcttatatcccattgtttattgccgctgctttattctgggcaattgaagaacagggttcgtccgtacttgcgttatttgcagctaatcgggttaatttggatcttggttttacccatctagctgcttctgatttccaaatgctaaacccattgttcatcatgatttatacaacaccattcgtgtggttgtggactaagtggggtaaaaaacaacctagttcaccaactaaatttgcgattgggttgctattcgctggggcttcttacctagtgatggctgtacctggagcgctctttggaactgcagggaaggttagtccatggtggttagttgccagttgggcagtcgttgaaattgctgaaatgttgatttcaccaattggtttatcagttaccaccaagcttgcaccaaaggcttttgcttctcagatgatgagtatgtggttcctaactgattcggttggtagtgcgcttaatgcacagattgtccgtttctactcgacgcaaaccgaagtgccatattttgcgattaccgggattgttagtgtcgttttagggattatcctctttatgatggtgccaatgattaaacggtcgatgcaaggcattcgctaaattgaatatttactcgaagatatgttatcttagtggtagcatatcttttttgttttggaggggttgaccatcgtacgaattgctttcagtagtgataatcattttgatgttaatcgagtggatgcgactgcgatgatgcgatctcaggcgacctatcttttacagaatggtgttcagatttatttgattgctggcgatctttttaatgactttcagcgtagtcagcagtttgtcgtcgatttacaggccctattaggcgcacagacgcgtgtttactggattgcgggtaatcatgacatggtccatggcatttcgtttgacgagcttgaaacagggcattttgatggctacctgcataaccggtatatcgatatttctggtacagattggcgcgtgattggacataatgggtggtatgactatcagtatgctgcccaggtccctgatacgactgcggccgacttcttacactggaagaatgcgttttggatcgaccgggctattaaacagccgatgagcgatcaggagcggactgatttaatgctcaaccaagtaaaagcgcagcttaacttggctgctgtggatcacaagcaagttatttttatgacgcactttgttccccggatcgattatttgcgtttttctgatgataatcggttttggaatatggctaacgcgttaatgggaacgccccggttaggacaactgttggagcagtttaacgtggcgcacgttttatttggtcatttgcacgtccatccgcaaccgcgggtgtttggtcagaccacctattatgaccaagcagtgggctatggactcaagcgtatcaatgaatggcaagccaataattttatggcggagtggtatcaagatacgcaaattctggatttgaaataaaaactgaaaaaactttgaaaaaagtcttgattttttattcaaaattatgtattctaatatagttgaatgatttacggaggggtagcgaagtctggctaaacgcggcggactgtaaatccgctccttcgggttcggtggttcgaatccactcccctccatttcattattgggctatagccaagtggtaaggcaacgggttttgatcccgtgatgcgctggttcgaacccagctagcccaatagataacacacaatagtcgtcaatgagactcaatgagccttgtatgacggcttttttgttgccatcgacacacaataaggcacaatagggcacaaataaaatgcaccacaattgcaccaaaagtgcaccacagaatgcaccacggatttatattaaatgtccatgtagcgagctagcttagaagccgcctcgtttcgttgctttttggtaacgtgtaaatagatctgttgtgtaatctttaagtcagcatgaccgagcgttttagaaacttcgttaatcgtggcaccagcttcgaacgataaagtacaaaaagtatgtctaaaagcatgaatctttatgcgtcttagatcatatcttttgcagatactacgattccaatggtcaggcatactcggtgatagtggttgattgtcgttgctagcaaaaataagttgtttagggtttttggaattgaagcccaattcaaaatattgtctagcttgggtcatccgccacttatgaagccattgcaacgtcttagggtcaattgtgatagtgcgatagctactatttgtcttgggcgtttgcgtaacgattcgccagttcttacctagtgattgcgtcttgttaaccgttatttcgttggtttcaaagttaatgtcccgccactgtaatgctagtgcctcgccacggcgtagaccagtgaacgctaacagacggaacaacataaaagcttgtgggttgtcataatcgtaggcacaatcaagaaaatgcactagctcggacttctcataaaaatcaatgtgaggtgcttgctggtgctttttttgttttggtatactggtcttagccattgggttacgggtggttaattccatccgtacaccaaaatcaaaaacactaatgacatacgttctaaaacggcggtactgtttgagaccttgattaagccagctatgcacgattgattgacattgggcgacagtgatacgtttaacccgttgagagcctaacgctggcaatatatgcagtctgaatatatctgctgtcttagcccatgttgattctttgacttgtgattggtagtcctcgctgaaccacttttcgtataactcattaaaagtaatatcgttgcttgatacataaccttttctagtaaaatctgtctgaacattggaagtccataattgggcttctttttttgtcttaaaaccacgtttgtgcatccgtttggctttgccgttggtatctttacccacggatgtaaaagcctcccagaaagcaccagatttagttttatactgtttgaatgtagccatattgattattcctttcataccagctggcgggcaagtatgtaaaggctaattagtttaagagtgttttgagaaatgtaattaaaagttttcttttttctgcgtctagtttattgccattatcatcgatatagataggcgctccggctagtgcatcctgaataaaaataggaactttaccggggtgagttgatcgtgcgtttaataaaaaacctataacatcaatgtctattgtgttgtttttcgggttttgagaatttacattgagaatatttttttctcctgacatgccatttaaatatgctgatgatacaccaagaactttagatattttttgaagtgattcaatttttggctgccttttgttgttttcataggcgcttattgacgaaaccgataaaccactttgttttgcgagagaaacgatagacatatttttagctttacgagctattcgtatattattcaatgagttcaccactattctacatttgtttgtactttacggttattattctacaaatgtgcttgacttgtcaactgcacttttgtagaattgtaaccaatcatacacaaaagtaggtgattaaaatggttgagacaactaaagagttaactcatgcaattggtcggaagcgtggggaacttaatataacagtgctagaactatcacggcaaaccggtgttagtcggtggacattagacaaaattttatctggagagcgaactagtgtgagagtggggactatcgctaaacttaatgattggctatataagcaagtttaaggaggccgtgctatggatttagtaacgttaacatcacagcgattggacgcggaagcatatacgactggcgatgtgattgcgaagtatgcagggattacccaccatgctgttaatgtaacgatcaatcagcagtatgagaggttggcgcgtgcaggtaatggcaaggtgtcatttaaaatgaagcctatgctaagtggtcaaaaagctaaggtctatttactcaacgagcaacaggctaccttgctgatcacgttcttaaagaacacaccacgggtagctgatttcaaggaggaacttgttagacagtttacagttatgaaacgtgaattgattttgcgtcaggctaagtttgaactaggtaaggatttttctaagtcattgcatgaaacgattaaagaaagtccggcgctaggtgagcatggtcacttatacgtgaatattaacaagttagtgtataagcaggcgttaggggtcaacgtgaatgagttgcgcaaagctcgcaatattcctaagaccgaggctattactcactacttaagttctagtgaggcggatgcagtcaagcgggttaaacagcagatcagaacgctacttgaaatgaaactggactaccagcaaatcaagcaagctttgcaaattcaaggcgtgatttaccgtattgagttgcaattgccggttaaagcatccgtaatgcaataacctattaggctaagtgctgagaggcggtgaggacgattacagaaccgattaaggtgttattaagtgatgaacaggcgcaggcactacgcgacttcgtataccagctaactacggattcaatcagtcaggctaagcgtgatgtgggtgctagtcagcagtggttacgcaagaagaaagcagcggcgtatgcggatgtatcagagggaacgtttgcaggctggacgaagcaaggattagtaggccacgtcattaatggatcagtgctatttaataagcacgacatagacttctatatcaatcacaatggaaaaatgaagtaataaaatccggctggcgggcaattgcgtttgatgaacacataataaattcgagtgaggatggtaactatgattggaacactattgatgagtttagttaagtttatgattatttcagcggttggcaacgtgtcatttaaattgattgctaatccgggtaagtatttcggttaggcagattaaggagttagaacatgaatgagcgtacaaaaaaagtccgtgttactcgccaaagtatcacacggacagcctgaaaacactactgttatgggctttttgtatactcattttactacaaaatgaggagtaaacacaatgggtaacccaatttatgaactatcaaagttaaatgatattagcgcggcgtgcaagcacgcgggtattttactagaacgggtcaataaagcaaatagcagcattttggccattagtgatttagttgaaccaacgttgaaacacttaattagtaatgcgcctgattattttgagttagacgctgacagactacgaaaaacacttgaaaaccgagaaacgactatctatagcacaatgtgtgtattagtagagatgggtacactagcaatgaatattgatgaggagacaagcggtctaagtggggttattgatgacattaatagcactgtaaacgggattaatgacggtattaactccattttggatggtggtaattcggattgcagcgatgataactcacagggggcgactaatcatgaataatacacagacgcaattaaatcatgctaagacgactttacaaggcactttattgcaactggactacttacaagagctagtcaatcaaacggtaatgcgtgatagtcagcggactaaaattagccagcaaattcataacattgaagtgaacaaccaaggcgcattgaaacaacttgcatccgtctatgaagtcccgttagtcgggatagccaagtaggatggtgagcgaatgaaagcaaacgacaggctaatgagggcgctacaacttgcccgtgatggtgttgcggtttaccccttagcaagtaacagcaaagtgccgttaaaaggcacacggggctataaggacgctgccacggatgtagaaacgattaaaggctggtttgagcatgtcccaagggcgaaccttggcatccgtttagaccaagctaagttaatcgtggtggatattgaccgacatggtgatattgatggcacggaaacattgagaaaactcaatcagcgaggcaagcccctgccgagtgacacttatattgagcagaccccgaatgatggcttacattacttctttaagttgtcggttaagctagatatgaaacggcgaacaggtctatatccgggtattgatgtactgactgacttcgtagtagtagcaccgagcgtgatcaatggtagtgattatagggcaattgaaccaactaacgagattacgacagcgccccagtggttaattgatgatctgttacccaatcaacggatgaacaaggcaccacagcacgcctcacagatacgaaagacgtgggcgggacgaatgcttgatgacttagtggctggtactggcgagggcagtcgcaatagctacctgacttcgttattaggcaagttactacggactggctgtaatggaatgacggcctacgagctactacaatatgctaacgagcgattacaaccgccgttaccggataaagaggttaatactattttcaagtccatcatcaaacggacgtaggaggtgtcaatgtgtcagaggataagaacttaaagcaagccatccaagagcatgacaagcggattaataacgtcacagctttaaagggtgatgattggcaagaccaactccgattaacgacccaaggggctattcggcggagttcgctatacaatattttactgtttattgaaaatgacccgaatttaaaaggtgtgttggcctataacgagttctcggatcgagtggtgaagttacgttctaatgataaaacgggactaaaaaagggcgattggcgagatacggatgattccttactacggttttattttgacgcacaatataacattttgctgtcaaaggataacttgctggatagcattgttaaagcgtcacaggaacatggctttgacccgatgaaagaacggattgaaacggtgaagtgggacggccagccaagggcggaaacctttttcattgattaccttggtgccgaggataatcactatacacggatggtaactcgcaagtggttagctggggcgattgcacgggtttatcttcccggagtgaagtttgatattatcccaatcttagagggaagccaaggacttggcaagagtaccttggtgcgccagttagcgcccgattactttagtgatgatatgaagagtatgaaagataaagacgactatcaaaagctaatggggagctggattattgaacttgctgaactgtcggccatgaacaagactgatattgagagcattaagaactttactagtgcccagtcggactattaccgcaacacttatgcgcgccggccagaacaacatccgcgccggaatgtctttatcggttcaaccaaccatcgagactatttaaaagacgctactggtgaacggcgcttttatccgattaaatgcggggtacagcccgttactaagaacccgctaaaggcgcaacaagctgacatgctgcagatcctcgccgaagctaagacttggtttgacgctggcgagcagctttattttgaccagcagacgcttaatgaggccaaagcctatcaacaagaagcccaagttattgatccaatgcgtgaggctgtaaatgattatctgacaatgatggtgccgactaattgggaagaattgacggttagtgttaaacagtcatatttcacggctattgagaatggtaatccaattgattcggattcagaaagctggttacatgcgaaactagcaccgaataaagaaccaattcagcgcacgactacccgtgagatcatggcggttgtttttgaccatgcgactaacaaatattttagtggtcggactaacgccgaagctaagaagattaagttgattatggataatatggagggctgggaatacagccaaaatttagttattaacagcaagcgcagtcgggggtatcaacgtacttaattggtactttattaaataacccgtgtaacctgtgtaacgtgtgtaatcattgatatattaggatttaagattaagtgaacgtgtgtgatacgtgtgttaacccgtgtagaaactacacacgttgagacacgttacacacggctatggtttgaaataaacgttgctatatcagcgttttacacaggtacacacgttacacgggtattttagtttgtaaaaaggtaaaaaaatgaaataaagctaatcacagataatacagagggttgggaacataaaagagtacacattggagaacgctatttacggatgtatgttaggtgttaaatagaaacttattactaaataacgtggttcaagtggttcaaagtgatgtaaagctatatatatcaagcgatacaaagatttactaacgtggttcatacgtggttcaacgtggtgctatcatggttcaaatgaaccacgttgaccacgtatgaaccaacagtgaggtgacaacaaatgttgctatatcggcgtttgaaccaatgaaccacgatgaccacgttaaaacgatattaaactttaaagaattgcatttaagatgaaataggaaaaggtaggtgccattaaaatgacgttatcaatgactgaatttaaagtattaaacatgttgcctcgtggtgcaggttacccaatgacaataccgaatatctgcaaggtaaccgggcttaaagaacgggatgtcagagaagccattagtatcttaattaatcaacatggcgtgccaattgttgctaaccggagcggtcataatacggggatgtttattgcaacggatgaagccgagttgaatatcggggtcacttcgtttaagaaccaagttactacgatgaacgcccgtattagagccatagagcaagctgacttgaacggctgggagaaagccctaagaccagacattaagcgcttagagacacaagtaagccacgataaggaggcgaactagtatgcgagtgctttaccctaagttagttgaagaagcctataattacattgctaaggctgaaccagccgttaagaatgcgcctaacgctgttaagtcagagatatacagcaagatggttaatgacgggataattgatgagaatggcgaaccaacacagacagctattgatcggggcttcattgatggtgatagcgagctagattatgaaccggctacgctgaccaagtttaaagcaatgtacccgtgttataaggagtatgacgatagccatttcagccacaccgatcagggctgggtgattgacagctatgtaatgaagtcattatcacttaaagctctcaatgacccggacagtagcgaagaacagcgcgcactcgcccgtcacgcactacaagagattgaacggtttagttaataagtgtaagtgagtatcgtgctaaaaagtacgatgctttttttagttgagcgaagttgtcccgttagttatttatatgaaaatggattgttatatcaatggttaaaaggctttgatggcaatataaaatattggaaaataatggaatcaaaatgttagaaaatgttagaaataaaaaacgggataatgctaacaattgctaacctaaaagccgaataggggttacaaaagtttactaaatggatagtattgtgaagactggaaaaccttataaaaccttatgcggaacggcctattaaaacctattattgttttgctgtgtaaactgcttgtttctgctaatgtgcagtgaacaacctgacaaaacctgacacttaggcagatcactttaattagatgtgcctgaaaagtggtgcaccccataacaccgatataccagcaatatggtgcaaccctatgttggtaaatgttgatattattcgtacaaaacggacaccatatagtaagcgacaagtaacccgacacgattagacggcatatttagctggaatgttgttatagcaacgtctatgggctaatgaaaactcatgaaatgtcggattatgtcggatattttactggaaaatactggaagttgaacattgccagttagttaatagcttgaatgcttgttatgactggccttagagctgttctaaataaatgaaaatgttggaaaatgtaggaatgtaaaaacggatgagtatgtcagctggcttagatggcgttgggttactggttgggttacttgctggggcactcgagcgagcatataatgcagacagttgttcgtgaagtagcacggacatcatgttataattcgattatggggattaattgtagcgttgtcaggaatggcaacatacgttaaaagggatgtttgcggggtggctagcgtccctttttttgatgattagcaagtggtatgatgggtttaaggagtagggctagaaaacgtcagctataaacgctggcgctttttagtcttttagggagcgaaaacatggaacagtggtatcgtaacgcacgccaatatttgaagcagtaccgtttttaccatgggattgttgagcaggcagttaatgattgggaaggggcagagaagcccaggcgattgcaacaaatggagttgtattgtcagcgggttactaatgcaattgatagcatccgtgatgaacgtcaagccaatctattgcgtaatgagttcattgtggcggatggtagccaacgggtggcctatgaactatcgggactaagtaagtcgcaatattatgtcatccgcaagcaagctatgcgtgaatggttgcagttaatcaatcaacacaaataagttagagaaaactggagttttagcgtgttttggattaatcgtaaacactgatataacaatgccattgaaccctgttatcatagccatagcattgttattttattaacaaccgtacagagagtacgcctgttgtaccgatcctaaaatgttaggaaatgttagggtgcaagtgtaaccggagttacggttgtaaataacggcgtaacaaaaaagccatcctagaattaatcaaggacgactaatgttatagaatgattaacaggtcaggcttacgccaagtaatatgccaaccttagcaaaagtctatcaaaaaatttaatcacaagctaaagaaacgcgatagctacctagcaattaaaacgtcaccatttggcaaggtatactgtccgcctatttcaccaagttcaatggttgtgccgttgagctgagtaaacggtgaatttagtatggcagattgcaagaaataacttgaacgaatttaatgacgtaaattaagcaagaagatctcgattggtgtatgccaattaagacatttaagtggccgtgaattcaaataccagttgatttgaaccagttggtgatcacttagttcttcaatggcttggcctttgggaataaagcgccgcaaaactcggttacggttctcattactgcctctttcatgcggtgaataggcatgtgcaaaataaacctgtgtaccagttcgccgttcaattgtctgatagttagcgaactctttaccatgatctacggtaagcgtcttgagcttgtcttgaagttgactagctagttcaagtacggcttgagtcatggactgactgtcgcgaccatggagccgtttaacaattgtcaggcgactcttacgctccacaaaagtagccacagcttgacctttacgtttaccagaaagtacggtatcagcttcaaagtggccgaattcctggcgagtttcgactttatgaggccgctcctcaatggagcggccgtgattgaacgtaccacgcttttctttagcacgatgacgacgaattccatgatcaggcaaatcgggcaactgtatatcaagccatccttgatcaatccagttatagaccgtcttgtaggcaatccccaccacatgggcaacttgttcaggggaccacttctggacttgaatcttttcctcgatcaagtgtttaaggtttttagtgagcgaagacttccgcccccgttgactaacctttcgttcaaagtcagtttgcgctagcccagcctggtactcactatttagccggtgaagttcgttaaagatggtggtcttactaaagcctaagtagttagcgatgtatcgcaaggaacgtccttcattatgaagcgtttcaatgacaacacggttctggaatgataaaatagtggtgctcatcaaggtccttttttctaatggattgtgtggtaacaccattaaagaccttgatgggtttttctgtccacttaaatgttcaacttaaattttacaatctgccttatttaaaaagcgtcaaattgtctgttcagaaagatctgaagatagacaatttgacgctttttggttataggctcaaaaatgaattgttgctataaattatactgactattcttttaccgtatcatttagttccttggcctgataaaagtccgggaagacgtgagcactcttgattccccaataataaaaaccaagggatgcaataataatcacgacaaagtcccaaggatatgggatccaattgataccgttaaattggtgactgccaatgtaggacatgattgaaatgaaaatgagataaaaaatcatccacatacttgaccaaaatgctttccgggtattcacataaccagctcggtactcgtaataaaagtagaatggtaatcctagtaaaataaccaaaataacttcaacggttgttggccacattgcccaatatacggcaagtgaagccaagacaaacgaaagtggtgccatccaatttaaatgctttaacttaacaggacgtttaaaatctggtgccaattttcgaaaggcaaccgctgttaccggcccggttaagtacgcaattaaggttgacgtacagataaccgttgccaaggttgcccatgatctaaatacagaaaccatcagcatacttagaaccaggttaacaatcatcgcaacacggggaatcccatatttttgattgatcttacctacgaaactcggaatacgctggttactttccatcgcgtaaagtgctcggccagttgatgcggcaaacgagacaccggttccgacgggtgaaacaaaggcatccatgtaaagcagaacggataaccagcggattcccaacataattgccaagtcggcaaatggggaattgaagttaataccactccatccgtgtgctgcaaccgcggatggcttaattgccgttataaagacactttgaaggacaatgtagataatcccactaatcaaaagtgaaataaaaatgccatgaccgatatttttatttgggttttcgatttcacttcccatattaataaccgtttgaaaggcattgaacgagaaaataataccggctgatgaagtagccgcaaaaatcggtgctgacccgtatggcataaattcgtggagtgaatggccatagttttcgggatgaaaactggcaattgtcagcataataatggttagcgttggtaccccgatcttaaaaactgagattaaactggtaaaactggttagaattttaactgaccagaagttcaaaagagtgaaaaccaacatgaataagaaaaccaccattaatcctgctgtggtaatggtgccatttttcaagaactgatgggtccagtttgcccacgaccacggccatgaactcatatattgaacggcagcaacagcctctattggaattaacgtaattaacgaaatccaattggcccatgaagaaataaatcccagaagcggtccgtgggaatattgtgcgtatcggctcatcccgccggcttccggaaacattgcgccaagttcaacataatcgtaagcaattgcggcaatgaccgcacccccgatgacccatgaaataatagcagcggggcctgctattttcgaggcttcccaagaaccgaaaagccagcctgatccaattaaggaaccaagcgttaacattacaagttgaaataatccaatcttagtcgttttgtcagaatccatttgtacctcctatttgcagtgacaaccagtgtaacaaatgagaaaattattgcaaatgaagtaaaatgaaaaaagtcgactggtgactatcatgatagtcaggagaagattttatacttttttaggaatagtaccgaaattgtattttttgagataaggcaaggaaacacgttcttttaaggacgtgatgaattgccccatttttatgtgcaatgaaagtttagcgtcattacctgtcaataaatttcctcaattgtcaagttaagtgcaacacttgataactagaccaattagactagcttaaaaggccatgaaggcctattcttattattaacgacaaaatcaacagataaggataggtgtcttcatgacccaaactaagaatatcatgcctaagcattaccaacaactccaatcttttgaacgcggtcaaattgagtccctgactcgattaggatttggcgttcgtcagatcgccagccggcttcaccggagtcccagcaccatttctcgcgaattaaaacgcgggttaaccacccagattgattcccagaaacatcggtcatatcagggctactttgccgagcgcggggcggcttactatcgagaacagcgggccaagtgtcaccccaaaggtttactgcagcgggctgccgtgttcttcaagtccctgccgaaagctttaaaagctaagccacgagttttcagtgtcgatacgtatgtccactattttaaagctcattacccgggctttccctgcccatcaacggctacggtctatcggtatatcgaggctggcaagctcccggagcttcacaactatgatttacccatgaagctacgtcgccgcgctaaacgcccgaatcaccgacatgcccgcctgaataaaaaacggcttggacagtccattgaagaccggcccgcagtggttcggaaacgtcaggagttggggccattgggaaggcgacttagtgaaagccaaacgggttgagtccgaaccagctttaatgacgttaaccgagcgagttagccggatggaaattatcgttaaattgcctgattaccgggcagagacttgccggcaagccctccaagatacgattgatgattacggtgcagaaaactttcggacgatcacgtttgacaacggctcggaattcgctagtttaaatcaggccttagaacaggattatcagatcaaagtttatttttgccatccatattcaccatgggagcgaggttccaatgagtattttaatagacggttacgctggttcttcccgaaaaagaccaattttagccaagtaacgactgatgagatcctagcagcacttgaactaattaatcaacgaccattaaaaatacatcatcaacagactgccattgaaagattccggacttgttcggattaaacttgtaatttgccataaaaaatttagataaaaaagaacaaggtgagaaaccaaaattagtttctcaccttgttctttgagcactcagattcctgtaccaaaccatcctataaccaacgatagtaacaataaagagtaagattgtaaatggtacttaaataaggctttgtgatcttgttcgtttggtagtaggaaagcttgtttttcaataggctgctcatgccaaataggttgttgtttccaaaaatgatatagctgttggggaagtgctatcgtgggtggaatagcaatcataaagccaatgattgctggtcggatttggatgatactatttccgaaagcaactatgtaccagagccacatgagcgaaccataaaagcaacctctagcaactgtaaactctagccagaagagtagttcgttttttagggagcttctacgatacgtttgaaggacttttttcttgatctgtttcatcttttgacgggaatcgcttttttttagaaagaggccccaaaaatataactcgtctgatcttgtatagtccataattttttttcgaatcttaccaagaaatatgagtaaaacaaactcaactaataagatcaataatggtaacatcaattttgggcctccttaaaaaggtacacttatccagtcgctggtagttacttatcgtgaatgttagagttatactattgctgattttaaccaccgaaattttaatagttaattcagttggcgccaacgtggtatttattaatttgggccacaatagccgactacatctataaatgacatggtatcatactatttatagatgtaggttgctaatgaatcttttaatcgatggttatgttggtttttctcaaacagtccaactttaaccatgtaacaattaatgagatcatagcagcacttgaacctattaatcaacggccattgaaaactatcggacttattcggattaattttacaatctgccgtataataatctgcggatgaagtggattaagaaaatcaaactcaaattgtgctttgccagttattacctcgccagtgctaagtgtatgcttaaatagtaaaacgccagcgtcttcgtaagacggaaatttaacatgaatacttttagtggtcaaaggctatcactcctaacaaatttgtctttcaattctattgtgccagttgtaggccaattttttgatctggttaacaataaatttaccaatacttaaatttataaaacatcagccgcacttattatatgtattgcccgccagcataattaatcggtaaatttatatgttttgaagataaaatgcaccaaaaagtgcaccacggactatttttgaagcctgaaaacactcgttatcattggtatatcagcatttatatataagactggttcgaacccagctagcccaattgttacgcctttcgtcgttaatcaggtcttaggatcttgatgtaacgacttttttattggcttaaatttatcttaatatcggcgggtagtgccacttcgtgaagaatgcgtaacggattcttcacgaagtggatttttttgtctcggtctgtttatttgccatcatcaataataatgtgatatgttttagtattctatttggggcacgatccagatgggataggaggtctggtcaatgaatttatttattccgtaagtacacggaagaggttaatggctggcattgttaattttaaaaatacgtactagttaacgcgtcatgacggccatcacaattattatgagtcgttcttataaaagcacaccaatttttaaagcacatatgggttatggaaagaagcgcgctaaccgtgctgttcgaaatcgtatgaatcgtggtgaatttgatgttttgcggctaattcgcatgcctggtataaacgatgttatgagcagtatgatgttgtcgattattgctccagagagacttatttgcaagttcaacttgagctggagacgatgcgattagagattactcgtaacggtgggattattcgaagaatcccacaacatctggttgttacgtatacttttgatccggtgatatctgatattgtgcacatgcagcgaacggaagaactaattcctgcgcaagatgtccaaatgtttgtaggtacttttgaacagtggtgtcgggagcgtcgcaactgctgggccaaggcttattatcgaaaataagtcgtattggaacttgatctatgagatttggttgaagaggctacgtagccttagttgtcccactaccagccccaactagttgactgaataaatcaaattttccacagaactgttatcaaatgtagtaacagcagactgttcagcgtcgcaatgacgcttggacagctttttgcatggcccatatctggatgcaaaggcatttacctgccagagatgacgtggttattaagtatatgactagtagtcagttattcagaattataagatgtttattcaatcgaacctcgaaaattgagtttgttagcgttaagcttaatttagggaaccataccatcatgaataacgtaagcgaccatgatgatgaccaaggaggatttgaaatggcggtaactaaaattgatttaaaaaccacgatgacttaccgggagcatgcaattactagtaaatcatttgctcgaaaattagggattgaactgccgtttgcgatgtacgcaatggcggcgggtgaaagtattagtgctgaacaatccacgctgacccgcttatttgaggttgttgatggtactttgaccgtccgtttggcgacggagaccgaccaagaagtgcatgcgggcgagatgttagtggtgccagctcatacggtccatacgttggtcgctgagcagccgtgccagtttattcaattagaaacgaaataggccttaatagcgagatgcggaggaattcaaatgagtttaattaacaaaattgatcatgctaaggtcctcaatttaactgaacaaattccactggatgatgatcaagttaatagccggacactggttcaacgggatgatttaagtatgacgctattttcagtcgcaaccgaccaagagattggcggccattctgcccagggcgatgcgatggtcaatattttaagtggagaagcggaaattacgattgaaggcaccatttatcatttaactgcgggacaatcgatcgtgattcctaaggatgcccggcacgcgttatatgccgttcaaggatttcagatgttattggtggtcgttaaacccgactaatgcacgtggttatcgatgagacggagggagtaatatgccgctgtatacgtttattggtgatattcatagtgccgcggatgatctggcagttttattagccgatcctgaagttaccgcgacgcgcttgattttcttgggcgattatattgatggtacggcggcacgctattttggtcatgccaccgagtcagctccgttggcgccgctaaaagtactgacgatggttagaaaacgggtacgggaatacggcgatgtggctttacttggcaatcatgatgaattttggctacggacagctcatggtgatgacaatgccaccgcaacttgggtgttgaacggtggtcaccggacctggcgcaaattagggatttactcctccaatcccaatcatgttcggcgggcattaaatggtgcgctattaaagccggatactgatttcttagcacatttgccgctgatgtggcaacatggtcggttactggctatgcacgcgggtgttaactggcaatacccattaacacaacaaacaacgactgacctactgtggattcgggatgactattatgatgacttcacgactggcagtcaccgttggcatcggaacttattcaataaagtcatcattactggtcatacgccggtgcagaccttgactggttcacacactggttatttaaagatgcaggcagatgcgcaagacgttccacgatatctaattgatgcaggcagtcgttcaggcctgtttgatggtggaatttgtgcgttaacgctgacggtcgatggtgaatttgtcagggcgaaacgcgtgatcaagggtcaccgctacgatggtcagcaaatcgtcactccggccatgttggtggatcaggcgcactaagtatcactaaacatctcagagatagaacgtaaaaggagcaggctcacatgatattgagactgctccttttatgatgtcacgctagttactggttttcgcactatttcaagttgattggtttgcaagttctcactgaattgttactcagcgtaactgaattatagttgtaaatagaaccagccaccaaggcctaaaatgaacaggccaagtccattgagggccgtaaacacgatcaaaaaatggtggagtggttgttcatcattgaagggcaacaattgttttaaggcaagcagatttgctagtgaggccaccaatgaccccagaccgccgatattgacgcctaaaaatagcgctgataaatggggcgtgaaattcgctagtaagatggcggctggaacattgctgatgacttggctagtaattagtccagtaatatagacactgggggctgtctgagtcaattggttgagccaatgcgttattgcgggattatgactgatggcgctaacgaagatgaagaagcagataaaggttaagagtagtgcgtaatcgacgtcccgaaagacgcgtcggttaatcatgaggcctacgacaatcgttccgataataactagtgaaatgggcaccaaattaaaaatgccaagcataatgaaactgagcaggccgcccgcaagcccgatttgactgcgagaaatgggcgtagatttggttggtgttacagttagcggcaaccgaggtaaccgccagcttaaggcaactaataaagttagactagcaagcattaacggggtcgataatttaaaaaacgtgaatagattaacgtgatagaacgtgaccaaaaataaattttggggattgccaatgggcgtaaacgcgctaccaagattagctgccatgataattaaagtcgttgggtaggcaatggccaggtgctgccgccgggcgagtgtgagaaagattggaattaacgttaggatcgcaacgtcgttagttaaaatcattgagccaccaaaggccagtaagatgaataattgacacatttgacgggtatcgtgtgatttaactaagagccagtcccttaaagtatcaagcaaatgcatcgcgcgaagtaattgaacactgatcatgagtgcaaataaggtgccaatcgtagcccaattaattgccgtcagttggggtgtcccgatgaacaaacttaaaccaacacaaattaatgcaataataaagattttgtcgtgaagtgtgcgacgaacgactgtcaccatggtaaacgtccccctcaatagtcagttaattagttctaacttaaacaaactcgtcgctaaatgtaaactgatagacatttttcagataaggatgtagccacccgaacggtaacccaaataaaaaatcgcttcaaagttatgtgcttaactttgaagcgattagtgcttggttttgattgccagttagcttgcttaatgtgtatctagtttatcttgctgagtgttttgaccgaagaaccacaagtaggcaccatataacgcgttagcgagcatcactagttgcaatgctaacattgaggcggctgcaggactgaagccttttaattggttgaaccagataataacgttaatcacgtcgagtgtgatccacgcaacccattgggaacgataaccgttgaccatgaggacactaccgacaatcccaagtggtaacagggtcgcgtccaggtagatttggttaccgttaagttgtttactaaagtgtaagacaatggcgtagacgagtacggctaacgcgaaccaggcacaaccggctaatttgctcaatttacgaccagtcagttcgctggcatcgggttgcgctgccattttacgatgccagacggtgatgccgacaaattgcatgataaggtaaaatgattgcgacgcaatgtcaccaatcagccgattggtgatggccgtagtaagccaagccgcacaggcaataatgccccaactatagttcgtcagtcgcccttgatcaaccagaattaagttaatcacgaccgtaatcccggtcaataggccaatccagccatgtaggctgtaatcgcgacccagaataaaaccaatgatggttacgattagcatcgtgctcatcatcaacttagtggtgcggcgaagcgtctttaattcattaagtccccgttgccagctgaagacggcgcgcatggccgtgggcagactagtgatgtcttgctggcattgttgcagcagggttgataaggtgagtcggaaatggttgttctggttcatagtgaaacactccttagttgtttttagacagccgtgttcggaagcaacgctgtgtttgattgctgtttacattagcttgttcaagcagacctgtcaacgagcttcgcacatattgaaggccgattattaatagattaatcaattggtttcagtattgataagcaatcaccttaatagagtggctcgtgatatttatttgttgatagtgaaagttgagctgaaagaagtgattaattacccacagtttcacaaatattggtatagtagaagagtaagcgggaatgtctgtttaatcctgcctagccgttaatcggttagtggttaatgatataaattataagtcagaggagcgttttacggatgaaaatcggattcattggtgccggtaacatgggccgcgcgattattgatgggtggttaaaacaacaagcggtcgtcccagcagatatttatattcacagtgcccatgctgcgagttatcaaccttatgcgcaaaaaaatgggctacaggcctgtgacactaatttggccgtggcacaagctgctgacgttatcgttttggcagttaagccgaacattgcgttggccgcattaaaagaagttcaagcagctttaacgggcaagtgggttattacaatggtatcaggattgagtttggccgattatgccacggttgtccctgatctccccgttctgagaatcatgccgaatgtgaacgtggcgattggtgccgggatgacggcgttggttggtaatgatgccttaacaccagagcaatatgcggctgggcaacaattattcgatgcgattggtgccacgagtgccatcgctgagaaagattttccaactttttcagccttagcaggtagttcgccggcctacatctatttctttattgacgcgatggcccgcgcaggcgtcaagcacggtttgagcaaggatgcagcgactaagattgcggcgcaggccacgctgggcagtgcgcagaatgttttagcttctgataaaattccgtttgacctgatcgatcaagtttcttcacctggtggcacgacggttgctggattactggccatggaagaggccggctttatgaccgcagtggtgaagggaattgatgcgacgattgcgaaggaacttggcgaatcttaaattacttggtgctggtggttgcaagtttggtctataccgattataattaaaccagataaatccaaggaggaattgttcatgagcaaagtgttaaaacatgccatcatttatactggtctagaaaagatcgatgacggctacattcgtttcggtaaggaaattgaagcggttggtccaatggatgactacgtggcccaacccgatgatgatatcgaatttgtgagtggcaaaacgattgtaccgggcttcattgatgttcatagccatggtggttatagttttgattcaatggacgggaatccagctgaaattaacgaaatggttaatgatatggttgcccgcgaaggtattacgtcatacttctgtacgaccatgacgcaatccaacgaaaacttagatcattcgatggccggtattaacaaggccgccgatgaaaatccggttatccaaggggttcatttggaaggcccattcatttcggcgacgtttaagggtgcccaacctgaaaagtacattaagaatcctaacgttgacttattagacaactggaacaagttgtcgggtggtcgggttaagttgattacttacgcgccggaagatcctggttcgcgtgaatttgaaaagtactgcttggaaaatggcattgtgccttcagtgggccacagtaacgcgactcgtgaacaattattagcaagtaaagcaactcacgtgacgcatttatacaacgcgcaacgtgaattcaagcaccgtgaaccaggtgttactggtcatgccatgcttgaaaacaacatgtactgtgaattgatctgtgatgggttccatatcgtgcctgacatgatcaagctcgcttacgaacaaaagggcgttgaccggatcgaattggtgactgattcaatgcgtgccaagggtgaacccgacggtatcagtgaattaggtggtcaaaaagtgattgttaaggatggtcaagcacgtcttgaagaaggtaacttggctggttctgtcctgacattcattaatgccttcaagaatattcagaagttcaccggttgcggcattgctgaagcggttaagatggcttctgtcaaccaagcacgtgaatttgggttgactaagaaaggaacattggaagccggtaaagatgctgatatcaacatcttagatggcaatcaagatttagtcgcaacatatagctacggtaaaaaagcagctaaataaattagaagtaagggatgagtaccatgagttcgccaatttatattcaaatccacaaccaaattaagcaggcgattgaagcaggtcggtgggccgttggtgaccggattccgtctgagcgggagctggctacacagttcgatgttagtcggatgacccttcgacaagcaatccagacattggttgacgaaggaatattagagcggcgagtcggtgccggcacgtttgtcgcgaatcagaaggtccaagaaaaaatgtccggtgtcaccagttttactgatctaatgctggcccagggtaaggtcccatcaagtaagacgatttcatatcacgtgacgagcccgtcgctatctgagagcgaaaagttggcgttaggcgccaacgaacaagttctacggatggaacgaattcgctatggtgatgatgtgccaatttgttttgaggtcgcaacagttccagaacgactcgtcaagcagttcaccaaggacgaaattacgagttcgttgtatcggacgttggaagagaaggcaagtttagtgcctggtaaggctcaacagacggtttcggcgatgtctgcttctgagcgtatcgcggaatacttgtcagtccggcgtggcgatgcgttgctacggttacggcagatttcgtatttgcaaaccggcgaaccgtttgaatacgtgcggacccagtacgttggtaaccggtttgagttttatcttgaaaaataaccagtcggtcgggtgatgggcacctgattagagtggtgataccaaaaatagctcacctaggatgttattctaggtgagctatttttgaattcatgactgaagactgggtacacgcacaaaagcaattgtcatcgtaacgcagtggcttataactggtaatgattgccagttaatgggcttgctggcgcgctatttttttaactaaccgcaagtagcggggtaacacgagcatccgcttgaaacgacttggttcttgaatcagacggtagagccattcaacgtggtgtttttgccaaaataacggcgcccgcttaaccgcgcctgcaattacgtcgaagctacccccgacacccatccagagcgcatcgaggcgttgacggtgttcggcaatgaaaaattcctgcttaggaaaaccagtggctacgaagaccatatcgggttgcgcggccacgatttggtcgacaacggtttgttcgtcgtcataatagccatcacgggcacccgcgacaacgatgccgggataatctcgttgaacgatcgtggtcacttgctttaacacggccggcttggcacctaacaaaaagatccgttggtgctgttggctaccccattctagtagtgttaaaagggtgtcatagccggtgatccgttcggggagtggtgtgccaagaatctgggccccctgaatgacgccaatgccgtctggcgtgatatagtccgcttgcgttaacacctgttggtaatcggggtgttcacgagcgtacattaagatctcggggttagcggtcaccacaaagcgattgcgatgcgcgagaatatcggtttgaagttgctgaacaaaaccagcgttagttgtcttgataaacggcacgtttaagatgttaaccgtgtcaaaagggactgacataagcgacctcactttctaatcataattaaagtataggtaaatcaaggaattctgcaactttttggatgcttaagcgcattcttttataaaaaatgctaaaataagcttaacttactgtaaacacggttattacctacgaaatggagaattatactcatgacgcaaatctatccggatgatagttttaccttgcatacggatgcttatcaaattaatatgatccaaacctactgggaacaaggtattcacaacaaacatgcggtgtttgaagtgttctttcgtaagatgccgttccaaaatgggtacgcggtatttgcgggtctggaacgagttgttaattatatcaatcatttacattttacggcaactgacatcgcgtatttacgtgaactgggtggctactcagacggttttctagattatttagcgaatttcaaatttgatgcgacgattcgtgcggttcgtgaaggggacttggtctttaataatgaaccgttgttacaagtcgaaggaccactggccacttgtcagttaattgaaacggcactactcaatattatcaattatcaaacgttgattgcgactaaagcggcgcgcattaaatcggttgtcggtgaagatggcttactagaattcggtactcggcgggcgcaggagtttgatgcggccatctggggaacccgggcggcttatattggtggctttgacgcgacgagtaacgtgcgggctggcaaaatttttggtattccgattagcgggacccatgcgcatgcgctcgtgcagacttatcgaaacgattatcaagctttcaaggcctatgcggagacccatcatgactgtgtctttctagtggatacgtatgatacgttacgtagcggggtgccgagtgcgattcgagtggctaaggaaatgggtgataaaatcaatttccaaggggttcgtatcgatagtggcgatatggcttacttatcaaaacgcgtgcgtgaacagctagacgaagctggttttccggatgccaagatttatgcgtcaaatgatttggacgaaaaaacgatccaaaacttgaagatgcaaggtgcaaaaattagtgtctggggtgttgggacgaagctaatcacggcctttgaccaacccgcgttaggggccgtatacaagatggtttcgatcgagaatgatcatcatcagatggttgatacgatcaaactttcaaataacgcggaaaaggtctcaacgcctggtcaaaaacaagtttggcggattacgaagcgtgcggatggcaagtcggaaggtgactatgtgacgttgtacgatgaagatccgcgcaacgaagaatcaatttacatgttccatccaagctatacgtatattaataagacggtcagcgattttgatgcgcgaccactattggttcccatctatgaccgcggtcaacaagtttatactttaccaacgttagatgaaatcaaggagtattcatttgaaagtctagatgcactttgggacgaatacaagcgggatttaaaccctcaggattacccggtcgacttgtcacaaaaactttatgatcataaaatgaatattattaacacggtcagagaccacgttaaccataaagatgaggaggaagcttactaatgcggccattacaagctgagattattaaagcgttacacgttgcaccaacgattgatccagaagttgagattcgtcgaagtattgattttttgaaggcttatttaactaaaaatacctttttgaagacctatgtgcttggcatctctggcggtcaagattccacgttagctggaaaattgacggagatggccattaccgaaatgcggcaggaaacgggtgatgatcgctatcaattcatcgcagtccggttaccatatggcaatcaagcggatgaagcggatgcgatggcagcgattgattttatgcaagccgacgtgacggatcgggtggatattcaaccggctacggatgccatggtaactgcattggaagctaaccaattgacgattcatgatttcaacaagggcaatattaaagcgcgccaacgcatgatcgtgcaatatgggattgctggtgaaatgcacggcgctgtcgtgggaaccgaccatgcagccgaagctgttactggtttttataccaagtacggtgacggtggtgcggatattgtgccactatggcgattgaacaaacgtcaaggtaaacagatgctggccgctttggatgcgcccaagcatttgtatgacaaagtcccgaccgctgacttggaagaagatcggccagcattacctgatgaagtcgcgttaggtgttcgttacgacgacatcgacgattacttggaaggccggacggtcagcgatgctgcggccgaaaagattgaggcgtggtacttaaagactgcccacaaacgccacgcggccatcactgtgtttgatgatttttggaaataagctagttagctgataatcgattaggattacggctaacctgattaaaaaggcgacttgaagattattcagcttcaggtcgcctttttgcatagtcacataattttatggtgactaccgtaatattggtgggattggtggaaaagcggtagaatggtttaaaatatgtaaacgcttaatgtgagaatatccaagtgctgtggcgaatgcagaggtagtcaaagcgattattttgctagacagctcccatggaatctggtattcttacgatacaatcataagggagtaactagcagaaatattctgcggcaatatcgtcagcaagaagccaatccggtattgtcttaaatagtgagacttatgtatgttcacacaattttgcgtgcatacatgagtctcattttctatctggaaatcagttagggagtggggctcggatgccagaaaaggagcttacgatgagtacaaaaccaaagtatcaacaagcgttatccgccgtttatgaggaactaggcactgatgaacacggcttacagcaaagtgctgcgacgcaacggttagaacaatatgggccgaatgcgttgaatcagcaaaaagcgacttccttgttgcaaaaatttattgcgcagttcaaggatttcatgattatcgtcctgttagtggccgccttgattgccgcctttactggggaagccgtcgatgccgttatcatcttattggtggtggtattaaatgcgattttcggtgtcttccaggaatcgaaagcggaagaggccatcaacgcgttgaaggaaatgtcagcgccggacgcgactgttttacgggatggtcagctgcaaacggtcaagagtgacgcgttggttcctggggatgttgtgtcgctagaagccggggatatcgttcccgcggatttacgattaattgagagtgcgtcattgaaggttgaagaatcggcgctgacgggtgaatctgtcccagttgagaagcaggcggagatgattgccgatggggaattaccaatcggggaccggttaaacatggcgtacatgaatagtaacgtgacgtatggtcgggccactgggattgtggtggcgactgggatgcagaccgaagtaggtcgaattgccggcatgattgaagcggccgatgagacgaccacaccactgcaagcgaacttgacacagttaggtaagtcgctgacgattttaatcttagttattgccgcagtggtatttggtatcggaatgctgcgtggtcaagagagtttgatcaacatgttattgacggcgatttcgttagccgtagccgcaattccagaagggttgccggcaatcgttacgatcacgttagcgttaggaacccagcggatggccaaacggcatgcgttagtacgaaaattacccgcagttgaaacgttgggaagtaccgatattattgcctctgataagaccggaacgttgacgcaaaacaaaatgaccgttgaaaagttggtcgtcaaccaggaactggtggacgcgcgcgctactgaattgccgcttgatagccatttagcgcaagtgatgattttaagtaatgatacgaagatcatgccggatgggttagcaggtgacccaacggaaacagcgttgattcaatataatttggatcagggttatccagtcgatcagttattgacggaccgcccccgagtaacagaagtcccctttgattcggaacgtaaattgatgtcgacggtgcaccccttagaagatggtcgcttcttagtagccgtcaagggggctcctgatgaattactcaaacgggtcactcagattgaaagtaacggtgacgttcagccattaaccaagacaagccgtgaccagattctaactgttaatcatgaattggcaacgcaagccttacgggtcttagcatttgcttataaagtgatcaccacggttccgacgactgttaatacggagacgttagaaaatgacctggtctttgccgggatggtcggcatgattgatccagaacggccagaagttgaacaagccgttgcagaagctaaatcagctggaattcggccgttgatgatcacgggtgaccaccgtgataccgccgaagcaattgccgtccgtcttggtatcattaacgctggcgaagatgacgctgtgattactggtgccgagttagatgcaatgagtgatgcggaattcggcaaaaaggtcggcgattactcggtgtatgcccgggtggcgcctgaacacaaagttcgaatcgtgaacgcatggcaaaaacgaggcaaagttgttgctatgactggtgatggggtcaacgatgcgcccgccttgaaggctgctgatatcggtattggtatgggaatcactgggacggaagtttccaagggggctagtgacatggtcttggctgatgataacttcgccacgatcgtggttgctgtcgaggaaggccgaaaagtgttcgccaatattcaaaaggcgattcagtaccttttgtcagcgaacttaggggaagtcttaaccttgttcgtgatgacgatgttgggctggcaaatcttggcaccagtgcatatcttatggatcaatttagtgaccgataccttgccagcaattgccttaggcgttgaaccaactgaaaagaacattatgcagcataaaccgcgcgggagaaattctaatttcttctcaggtggggtcttcagcagtattatttatcaagggctactggaaggtggcattacgttgctcgtgtactggttagctttgacgtatccggttcacgcaacggcctcattagctcatgctgatgcgttaacgatggctttcgcgacccttggcttgattcagttgttccacgcgtttaattctaaatccattcatgaatcgttgtttacggtcggcttgttccgaaacaagttctttaattgggcgattctaattgcatttgtgatgctggcgatgacaatcgtcgttcccggtctgaatgggttattccacgtgagtcacttggatgcttaccaatggggaatcgtggccttagcttccttatcgatggtcgtgattgttgaaattgttaagttcttccaacgtcgacacatgcggcgcgcataacccatccattaggggtaaaataaggctaactaatttaaagaaaagagtttgtacatgaaaaaagcaacgattcaaacgtatatgccagtactgtctaaagttatcgaaagtactgaaaaaatgggggaagaattaaacccatcttttgaaaaactacgtcaggccattgataatgacgcagttgccaaaatggttccagctgaattcaatgatattcagatggaatttagcgatggtactgaacagtatcaacaaaatttggcacagttgaaaaaagttgcggtacccgcacggttaatggggcggcaccgtaatttgttagcagcatacgaagcctacacgaatgcgtgtgcggccatgacggctagcatgaacatcgacgatcaaacgattgatgtggctgcttttaatcaggctgaaacggatcaagagactgaaatgggccgcgtttcaaataacgtgcaacggatcatgaatacagtcatgtaggagcgctaatctgggtgattggatttagcacactaataaaacgctcggtaacgtttatgcgttgccgagcgttttattgttggttgcggggcagccaactgtgcggccgcgccgtgctcgtttagcctaatgggctggttttttccagctcacaaccaatgtgtgaacagtatcggtaatggcttcgattggtagtgacagtcaacgacaattttcagatggtcattcggcgcggaaacttgggtaaaacgcgtataatataatgtaatgagattaaaagattgggtgaaataatggataatcagattttaacgttagttaatcaaacgctgacgaagtttaaaccgcaacagatcaaagcggttctcggactcatggacgaaggcaacaccgttccgtttatcgcacggtatcgaaaggaacgtaccggtaacttagatgaagttgaaattcgcgaaattaaagataactatgatcggcttgcgagtctagagagtcgtaaggcagatgtgatgaagttgatcgctgaacaagatcacttgacgccggctttaaagcaagccattgaaaaagctgacaagttgcaagatgtcgaagatttgtacttaccgtacaaacagaagcgacgtacgaaggcaacgattgcgaaagatgctggactggagccgttagcagcttggttattacgttttccggcaagtggtattcatgaacacgcggcgcagtttgtgaacgaagcgcaggacattacagacgcgaataccgcgttagctggagctcacgaaatcttagctgaggcctttggtgataatgccggtttacgaaactgggtccggaattatacgcgtgaccggggcttactagtcgcaaaagtgaaacccaagggtaaagcagccgatgaacaaggtgtttaccaacagtattatgattttaatagtcccatcaagcagatggtaccgtaccgggtactggctatcaaccgtggggaagccgaaaaagtattgaaagtcagcattgatgttgatcgtgctggaattgaccggtattgtcattttcgctttattggtcagcaccacggcccagcgattgaactagtagaagctgcttatcaggatgcctacaaacgctttattggcccggccatcgaacgtgaacttcgcaacgaattgagtgcggctgccaatgaacaggccatcaaagtctttggcgataatttgtaccacttattaatgcaggcaccattaaaaggtcgcgtggtattagggttcgaccctgcttaccggacggggtgtaaattagccgtgatggacgcgaatggtaagttcttagataagctcgtgatttatccacacaaaccagccccaactgccaaacgggaagctgctgcgggtgagtttaaagcctttttggagaagtatcatgttgaaatgattgcgattggtaacgggacggcttcccgcgaatccgaggagtttgtggcacaggtattgaagactatgacccgaccggtttattatgtcatcgtgaacgaagccggggcttccgtgtactctgctagtgctaaggcgcgcgccgaatttcctgagctacacgttgaacaacgtagtgcgatcagtatcggccggcgactacaagacccactggcagaattgatcaaaatcgatccgaagtcagtgggagtggggcaataccaacacgatgtgccccagaaggaattgacaacgcagctagatacggtgattgagaccgcggttaaccaagttggggtcaatttgaataccgctagttcggagctattgacgcatatttcggggctatccagcacgattgcccaaaatgtgattacttatcgggatgaaaatggcgaattcacgagccgaccacaattgaaaaaagtgccgcggttgggaccgaaagcttatgaacaagcggtcggcttcctgcgaatcattgacggcaagaatgtttttgataacacggatattcatccagaaagttatcccgcagccaaagcgttattggcagcggctggattgaagacgacggacgttgggacgactaaagcccaacagttgaatcaattagatttaacgcaacttgcgaccagcaccggtgtcggtgaactgaccttaaaggatattattagtagtttgcaaaagcccgggcgtgatgttcgtgatacgatgcccgcaccgttactccggcaagacgttttaaagatgagtgatctaaaaccagggatgcagttgcaaggaaccgtacgcaacgtggtcgactttggggcgtttgtggatattggtgtcaagcaagatggcctcgtacatgtctccaaactaacggataagttcttgaaagatccgcgtcaggcggtggcagttggcgacatcgtaacggtgtgggtcgaagcagttgatgaacagcggcagcgcattgctttgacgatgattgcaccggctgaagcataatgactgatttagagttacagcagctcgttgcgaccatttccatgcgtgattttcaccgtccgttccagcaccgcgcttattttaatgctcggttacgaacgacgggtggtcgttatcagttggcctcgcatgatattgatatcaatccgaagatgctgactgattttgatgaggccaccttgattggcgtcatcaagcatgaattgtgccattatcatttacatttgactaagcggggatatcggcatcgtgatgcagactttaaacgattactcgcgcaagtggatggctcgcgctatgcaccagcgccgaagcaggcgacggcccggccgtatcggtatatttatgaatgccaacggtgtggccagcggtattaccgcaagcgccgcatggacactcgccgctatacgtgtggtcgttgtcaggggccaattaaattagtctgaaaaggtttgctaaagtggtacgcttccgatagaattagcttaactattgatatggagggattaagatggaaacgattaaaattggtgtggtcggactaggcacagtcgggaccggcgttgtaaaaatgcttcaagcacatcaggaaaagatttcagaaattaccggtcgtaagttggaactagcttgcgtagttgtccacaacttgaaaaagcacgaacaagttgatttgggggacgttcagatgaccgaccaaatcgcgaccctgcttgatgatccgtccattcaaattatggtcgaagtgatgggttcaattcatccggcgaaggaatatattacgcaagccttgcaagctggcaaacacgtggtgacggccaataaggacttgattgcgcaatatggccgggagttggttcagattgctcgtgaaaatcatcgtgacctgttttatgaagctagtgttgctggtgggattccaattttacggacgattgataatagtttcgccgctgaccggattcaacgggtcatgggaatcgtcaacgggaccactaattacatcatgacgcagatgctgactaagcattggtcgtatgatcaagccttgagctcagcacaagacttggggtttgccgaaagtgatcccactaatgatgtcgaaggccttgatgcggcgttcaagatgattattttaacgcagtttgcctttgggatgagtctttccctcgaccacgttcaagttcagggaattacgaaaatcagcccagaggatattgcggaagctcaccagcttgggtatacaattaaattactcggaattgcggaagaaattgacgatcgcattgcggtctcagtcgggcctgtgcttgtttctgatcagcatccacttgccacggtacaaaatgaaaataatgctgtaatggtaacgggaacggctgtggggaacacgatgttttacggtcctggcgctggagaactcccgaccgccaacagtgtgctgagtgatattacaacggttgcgaaaaatattgcgttgaatacgactggtaacacgtttaactcttatcgccaggagacagtcttagcaacgcctgaagatgttgtgtatcctcactttattgccttgaagatgcgtgatgtgccggggatgatgatgaaattgacggcgattatgacccgcgcagaagtttcatttagtcgaatcattcaaaatcaattaggtgacggcaacgctcgtgttgtgatcattacccatgccatgaatgatcaacagttagcagatatcactcgtgaaatcggtgaacaagagaatatgcaactattagcgagttataaagttttaaagaatgcgtaggtgaggacatgttaacgatttcggttccggcgacttccgctaatcttggtcccggttttgattcaatcggtctggcgctggacatgcaactaacgctacaagtgttgcaacctagtgaccattggcagattgaccatccctttggggcggatgtgccgacggatgaacgcaacttaattattaaaacggcgttgcatttggtaccagatttacaaccacagcatttacagatggcttcaaaaatcccgttagcgcgcggattgggtagtagctcgacggccatcgtagccggcttagtgctggcaaacgaattgaccggcgcaacgcgctcttctgctgagctactggaagttgccactcaactggagggtcacccagataacgttgcaccagccctattaggaggcttggttgtggcgacgaacactgatgaacgcgtccgtgcggtgaagttaccgttaccgatgctttttgcaagtgtctacgtgcctaacgaaccgttattgacgaccgccagtcgccaagccttgccaactgaattggcgtaccaccaagccgttactggtagtagtgtggcgaatacgttagtggctgctctagcaactcaaaattgggacgtggcgttaccgctgctagaacaggaccagttccatgaacagtatcgggctaagttagtgccggcactacaaacggttagagaccatggccacgctctgggattaacggggacttatttgagtggtgctgggccgacggtgattactctgggtgattacggtcaactcgctacgttgcaggcacaattgagccaagatacaacactcactggccaattattcctattgccaatagatgcaactggtgtaaaagtacaaaaatcttaaaataagcttgtcagactcgcaaaattttgttatgatattttttgtgagttgtgatgcggccatggcggaattggcagacgcgcaagattaaggatcttgtcggggttaacccggtggaagttcgaatcttcttggccgcactaacgaatataagaatcgatttcgataggttaagccttgaaggatcgattctttttttgttgcggtaaattggactggtcacgttattccaggcttgcttttttgccaactacttcaactatgttcaccaaatttgccgtaccttattgtttaatctcatgattaccagcattataatgaaaacggttaatctactgattacgatattaagagaaggcgaggaccaggcattgattagaatgagtagatggtggtggcgtatcttggtgggcggcttgctggttagtggcgtggtttaccccgcacaagcggccgtaacgacttatccgattacagggattcaggtggtgcagccgcgggtctatcagacgaatagtcagaacggtgtcggttaccatttaaccgtcgtgcgtcatcagcgtgcccaattgcgtgttaatttacatttaaagtatcaccagcatacacagtggacgcgtactgagcaagctgatatttatcgcaacgggcattaccaacgcttctactatgtgcataatggtcatcagcagagcggctggatagctgctaatcagctaaaacccgccagtacggcgtcggttcaactgcgggtaccactgattgaccagctaccggagttgccaacggggtgtgagatgacagcgactaccatgatgctgcagtatgccggcgttaatattaataaggaacagtttgccagccacgtgccgcgcagttcgaatcctaacactggctttgttggcgatcctgcttcggcctatggtattggtctctacatctacccccaaggcttgttaccaacgatccgccactatctgccgtccgctgtagatctcagtggggtgggcctgcaacgaattaaagtgcagctcgctaaacgtcatccggtagtcgcttgggttcagggactcgatggttttgcgagtcatacagtgacgctcactggatatacagcggcaactattaggtacaatgatccttggcgtggtcaatccggacagatggataaccaagcgtttgagacgatgtggcaattaaatggtcgtcgggcactgagctattaagaaattgataccatagttaacattagttactgtttcataattttatattaaaaatacgctatttgacacacaaaataatcgtttttaatactgtatcgcactagtgtatcaacttctagcctgaaataagggcttttagctttagtgtattttggcacggaatttgcatatatataagtgagtgcgaaaaagattgcgcttacagtatcaaaaacataaatagttacaggcaatttagatattatttattcgttttatatgactgtaacgaaaaaataggaggtacaaagatggtaagcattatcattgctagtcacggcgaattcgctaaaggcatctatcaatctggatcaatgattttcggcgaacaagaaaacgttcaagccgttacgttgatgcctagcgaaggccctgacgacatcaaggctaagttggaaaaagccattgcttcattcgacgatcaagagcaagtcttattcttagtcgacctttggggcggtacaccattcaatcaagttaacggcttgtttgaagcacacaaggacaaatgggcaatcgttgccggtttgaacttgccaatgttaattgaagcgtatgcttcacgactttcaatggattcggcacacgaaattgccacgcatatcattgaaactgctaaggatggcgtaaaggttcgtcctgaagcattagcacctaaggaagaaaaggctgctgccgctgcaacgaccaacaataacgctggccggccagggaagttggaatatgggttagcacggattgactcgcgactcttgcatggacaagttgctactgcttggagtaagacagttaacccaactcggatcattgttgcgtctgataacgttgctaaagacgaactgcggactaacatgatcaagcaagcagcgccatctggtgtcaaagcgcacgttattccaattgctcaaatgattaagattgctaaagatgacaagcactttggtggtcaaaaggcgttggtcttattcgaaacaccacaagatgcattacgtgcaatcgagggtggtgtgccaattaagacattgaatattggttcgatggctcattcggctggtaaagttcaaccaaacaaggttttggcatttgatcaagatgatatcgacacttaccgtaaacttgaaaaagacggcatcgaatttgatgttcggaaggttccaagtgatggtaaagaaaatatggataacattttgaacaaagctgaaaatatgttgaaggaacaaaagtagttccaagaatatcagaaaagatggaggattaaatcatgaatttgaacgtaattcaagtgattttagtcgtacttgtatcatttttagctggtatggaaggtattttggatgaattccacttccatcaaccagttgttgcatgtaccctaatcggattagtaaccggacaattagtcccatgtattatcttaggtgggagtttacaaatgattgccttaggttgggccaacattggtgccgccgttgcacctgatgctgcgttagcatcaattgcatctgcaattattttagttttaggtggtcaaggccgtgccggagttacttcagctattgcgattgccgttcctttagccgttgctgggttactcttaacgatcatcgctcgtacgttagcaactgggattgtccacatcatggaccgtgccgctgaagaaggtagttttagtaaaattgacttctggcaatgggttgcgatctgcatgcaaggacttcgtattgcgattccagccgctttgattttggccgttggtgctacgccagtgaaggcaatgttaaacgctatgcctagctggttaactgatggtttatcaatcggtggtggtatggttgttgccgttggttatgcaatggttatcaacatgatggcttctcgtgaagtttggccattctttgctttaggttttgttttagctgcgatcagtgaaattactttgattggtttaggtgcaattggtatttccttagccttaatgtacttggcactttcaaagcaaggtaactctggcaatggtggtggctccaacacgggtgatccggttggcgacattatcgacaagtattagagaaggaggcaaactgagatgtctgaaactacaaatattactaaaaaagttacattaagtaaaagtgatcgtctgcatgtttggtggcgttcaacgttcctccaaggttcatggaactacgaacgtatgcaaaacggtggttgggcttattctttaattccagcaatcaagaaattatatacaactaaagaagaccgtgctgctgctttgaagcgtcacatggaattcttcaatacccatccatacgtggcttcaccagttattggtgttaccttagcgcttgaagaagaacgtgccaatggggcacctattgatgacgttacgattcaaggggttaaagttggtatgatgggacctttagccggtgttggggacccagtgttctggtacacggttaagcctatcgttggtgccttagctgcatcattggctatttctggtagcattgttggaccaattttgtacttcgttgtttggaatgcaattcggatgggcttcatgtggtatacccaagaattcggttacaaagccggttctaagattactgatgacttatctggtggtattttacaagatattacccgtggtgcttccatgctagggatgtttatcttggcggcgttaatcgaacggtgggttgttgttgacttcagtccagttaaagtttcgaccattaagcaacaagctggttcgtacattgactgggataaactgccaaagggtgcttctggtgttaaggaagctttaacacaacaagctgctggccgttcacttgacaaatacaaggtaaccaccttacaagataacttgaatcaattgattcctggtttgatggcgttgctgttaaccttcctctgcatgtggttattaaagaagaaagtttcaccaatcattatcattcttggcctcttcgtatttggggttctaatgcacgttattggttggatgtaatacttgcttatgtcatatttaaaggatggactcgtgggagctcatcctttttatttacaagcgtactttgcataactgacaaactcgccgtataatcggtatgaggatggatacgaggagggattaatatggtgcaatcaatcaatactaaggttgatttagttacgaacggtaattcacatatgggattgaccgattacggtaaaattatggtcggtgataacggctttgaattttatgatgatcgcaatgttcgtaattttattcaaatcccttggactgaagtgaaatatgtggtcgtatccgtaatgtttggtggccgttggattccgcggttctcttttcaaacgaaacggaacggtatgattactttctcagctaaggaccctaagaaagtgttacgagccgttcggcaatatattgagcctgatcgaattgtaaaatcactgacatttttccaagtccttgggagaatattcaagggtaaaggtaaaaaagataagtatttgaaataatgaccaatgctgtcgagggttctttgccgacggattggtgattatttaatagttagtttaagaagcttaggtatcaacgggtggggttagcgcgttgcagtgtctaagctttttttgacgcatcaaaagcagtatctgagcacgttaaggtgcgtcataaatggaatttcaataccatgaaacagaaatagttgtactgacaagtcttaaaaagtaactgagtcgggaactatggtagaatatagtgtgttatagtgtatcaaaacggatcagctatttgatagtggtgaaaaggagtggcgaagttgaccagaaaatccaagatttgtgaatacgtccgtcaacatagcgatcgacacggactgacgacggaaatggtagcgaccgctttaatgatagcgcgttcaaacgtcagcaaggaattaaatgcactggtgcgagaaggccagttgcacaagctgacagggcggcctgtgcactatgttccggtgaatgcaacagccacaacggccacaacaactagtggcgtagcgaatggagcgacgacagagcgaataccgacagcgcccgtcgcgacgtctgtgcctaaaccggttgtaaatgatatatttgccagcatgattggctcgcatgagagccttgctaatcaagtggaacaggcgaaagcggccattctttacccaccgcggggattaaatacattaatcattggcccgactggttctggtaaaacttactttgcaaacgccatgtatcgttttgcggaaacccaacaagtcttaacgaacccgcaaggcctgattacgttcaattgtgccgattatgcgcataatccggaattattgatgtcgcatttgtttggttatgttaagggggcttttacaggtgctaatgaagataaggacggtttgatccaagaagcggatgggggcatgttgttcctagatgaagtgcaccgtctaccaccagaaggtcaggaaatgattttttatttcatggatcacgggacttattcacgactcggtgagacggcgaagagtcaccatgccaatgtccgcttagtttgtgcaacgaccgaggacccagaaagtaccctactgcagacctttgttcggcgaattccgattacgattcagctaccagcgttcaatcatcgctcagccaaggaacgtttagaattactgaaggcattattgtcattggaagctaatcgaatcaataaacagattcggttaacggaggacgtggtgcaggccttacttggctcagtcacatttgggaacgtcggtcagttgaagtcgaacattcagctggtgtgtgcccagggttttgtcaatagcatcgaaaatgacagtgaaatcacaatcacgatggatgatttgccacaaaatatccgtagcggtctcatgacagtagcctctaaccgtcacgaactgggggccatctctgagttgttggacccggttctcatcgtgaagccaaatgatggtccaacgccgcttcgtaataagaacgataattatgaattaccatataatttatatgagattattggtgataaagcagcgttactccgacgggaaggccttgataaagaacacatcaatcgtttcatcacgaccgatatcaatgtgcatttaaaatcattttataaacaaaatcagttagaagtttcaccagaaaacaagttagccgagatcgttgatcaggacgtcattgattttaccaagacggcgcagatgacggttcaagacatgctaggttataatttcaaggataactttatttacgctgtgagcttgcacgtcagttcctttatcaaacgcatccaggcaggcaagcccatgcgtcaaatgagttcggatatgttagcgatggtgcgtgaatatccggctgaaatcaaagcagcggaggcgctcaagcaaggattagaggaacggtatcatttaccgattcccaagtccgaagtttattatctggccattttgctcatctcgttaaaatcgatgcagcttaacggcaaagttggcgtgttggtggcagcgcacgggatgagtaccgcgtcttccatggcacaggtcgtcggacaattgttagatgattatgatgttcaggctttcgacatgcctctcgatatggacccgagtgtcgcctatgatcatgtcaagcgacgagtagaaaagcttgattctgggaaaggaattttgttactagtcgatatggggtcgttaacgaccttcggggaacgaattcagcaggagacaggaattgcgacgcgaacgattgacatggtgaccacgccggttgttttggaagccgttcggaaggctagcctggtcgatagtgatctggattctatgtatcaggagctcgttggtttcaaaggttattcgcgaatttcacggaacctaccaacggatagtcagcgcgcaacagtcaagcccgccttagcgacggataagacggcacaacgggcgattattgcaatttgtgcgaccggcgttgggacggctgaacgtatcaagtcaattttagacagtttattagctcaaaactttatcgaaggtattacggtattcccaatctcagtggtcgaaatgaagacacggatacaacaaatcagtcaaaattatcaaatcattgcggcaactgggattacaaaacccgaattagacgtcccttttatttcattggaagaattgctacaaggtggtggcgaaaagtttattgaccagttagcgacgggtatcgattcgccacagaccatggcggaagaaagtcagcagttgacaccggaactctgcgaacggtacttaggcgattacttcacgtttttaaatcctaagaagttaacgggaattttatgggagtatagcgaagtgattgcgacgcacttggatggtgtaatgacgaatgcttttcgcattgatttgattatgcacttagcgggtgcgctagaacgaacggtcatcaaagatgaaatttcggcacccaccgaagagatgccagacattatggcatcgaagtggtacccacttgtgcaacaggccaatcagcaattgacagatcaactacagttaaccttctcagatgctgaaaattattatattgtgcaattattggagactcatcaggcaaaggtcgcgatgagttgatacactaacttggcatgctttttgcatgtatcttattgagtagatttaaccgactgaggagggaaagtagatgttagcatttgtcgttgtcagtcatgggagttttgcgcagggcgttgtcgattcatcctacatgatctttggcaagcaagataaggtccaaacggttacctttcaactggacgaagaacctaatgaattagctgataaattagctgctgcggttgcccggtttgacgcggatgaccaagtcttattcttggttgacctatggggcggttcgccatttaacgccgctagtcggatcgttgccgaacatacagagcgcatgggtctgattaccggtctgaatctgccaatgctgattgaggcttacactgttcgtgataagccaattgatgaggtgattgcccaccttgaagagactggaaagattgggattaagcatctcaagttgttacaggacgatggggaagatgagccgctatgacgatggatattcgtttagcacgcattgatagtcggctactccacgggcaagttgccacggtgtggaccaagacggtcagtcctaaccgtattttggtcgtctcagacgaagttgcccaggatgcacttcgcaagattctaattgtgcaagccgcgccccctggtgtgaaagctaatgtgattacagttgacaaaatgatcaagatttatcaagactcgctatttaatgaagtaaagccactaatcctaactgatacgccccagaacatggcgcgcttagtagcggggggacttgattttagcaaaacgggcattgatattggtagtctagctttttcagcgggcatggtgatggtcaccaatgctattgcaatcggtcaagccgaagcacgggcattatatgcgttacaagcagcgggattaaaggtgtttgcgcagaaagtcccgacggataaacgggttgatgtgatgccgctattagctaaaaatggctttatggcgccagataagtattaacaaagttatgatggacagtggtgtgtcggttatgggcaccactgttctttcattttggctaggtttctaaggatttaccaaaaatacagccgtaaactttgacggataggcttttattgataaaattaaactaatcgaaacggaaagtagcgggggtttaaaaatgccaacttatacaaaattaaccgccatgggacaatatgttccgggacgcgttgttgataatgacgaattagcagccattatggacactagcgacgaatggattcaggcgcatactgggattaaaacccgacactacgcgatgaatgatgaaaacacctcggatttagccacccaggtcgcccagcagttactacaaaaaagtggtttagctgccagtgccattgatttgatcctagttacgacaattacgcccgatgccttaacacctgcgacggcttgtttagtgcaagctaatattggcgctgataatgcgtttgcgttcgacctgagtgcagcgtgtgctgggttcacgtttggcctagcaacggctgacaagtttattcgcagtgggcaataccaaaatgtgatggtgatcagtgcggaagttaattccaagatgatggactttcaggaccggacggcagccgtcttctttggggacggtgctggtggcgcgttattacaagctactgacaatccagatgaaaacagcttgatcgctgagaaattagaatcgcaaggaaacgctacggtcattcactctggacgagtacggccgattactgaagttgccgcaacgaactacccgcaaacggatgcgttttaccaagttggacgggatgtttttcaatttgccacgacggttgttccagaacagatgcgtgggttaattgcgagtgcgcaactgacacccagtgatttacaatacgtgatctgtcatcaagctaatttacggatcattgaaaaaattgcggctaacttggcgttaccaatgacgaagtttccacataatgttgatcattatggtaatacgtcctcagctggggtggcaatggccttagccaatgtttttgataccttaactgggccagtgttgttaacagcatttggtggcgggctagcgtatggctcagtcttgatcaagaagtaggggtgtgcagatggaattaaaagatttagatcgattagttgagaaatacgcgcgacagggttatcagcaaattcgcgttaaagccggcgacttggagattgaagtgacaaaaccagcgttagcttcagaaacggtaactcccgtagccgctacgcctgccagcacagttgcggagactgaagatgaagtcgttacactgccgagtccgatggtcggggtggtccacttggcaccagatttaaaggttggtcagtcactgacagctggtcaagaactaggccagattgagagtatgaaattattcaatccattagttagtccgaccgatgggacgttaacagcagtactagttgctgacgacgccactgttgagtacgaacaaccgttatttacaatgcgaaaggatcggtagctatgtttcgcaagctgttaatcgcgaatcgcggtgaaattgccgtacggattatcaaagcctgtcaacaattgaatattcagacggtcgccgtttgctcaactgctgatcggcatgcgggttacacacaattagcggatgaagtggtctgtatcggacctgcagctgccagtggatcgtatttaaatgccgaagcgattctaatggctgcaattaatacgcacgccgatgcgattcacccgggatatggttttttagctgaaaatgcggattttgccgccatgtgtgcggaatgtggcattgcctggattggcccgcagactgagcaaattaagttgatgggtgataaggcccgcgctaaggattttgcacggcaacaagccgttccggtactagcaggtcaatcattacaaggcttggcatggccggatattaaacacgcggccgccaagatcggttttccactagttttgaaagccagttatggtggcggtggcaagggtattcgagtgcttaccgacgttcatgaactccatcaacaattgcgggctgcgcgtcaagaagctgctgcgtcctttttgaatgatgcgatgtatttagagcaatttctgacaactgcccgccatattgaagttcaagtcctcggcacggggacgaaattattcattcttggtgatcgtgactgtagcctccaattgcacaagcaaaaggttctcgaagaaagtccggcaagtattttgactgagacacaacgccggaccttatacgatttgtcccggcagttattagcgggtacacattatcaaagcttgggcacaattgaatacttatttgcggatggtcagttctatttcatggaaatgaatacgcgtttacaggttgaacacggggtgacagaattaaccaccggaattgatattgtggctgaacaaatcaaacaggcggctggcgtcacggttgattttccagagcatgttggcttgcagcccaagtgtacggcgatcgaagctcgattgaccgctaccttaccggttaagcagacgcggattgaaacgctgagctggccagccgatgtacgagtggatacggattatcatcagggcgatcggctagtaaccatgtatgatggtttaattgccaagttgatggtcaccggtgtgaaccgtcagcaagccgtgcgcaacttacaacgggccttagcgcaagtaacattgacgggacccacgacgaacttaacttttctacagcaaacggtggcccggccggcctacattcatgatcagtacacgattcacagtctagcacgttgggaggcgtcgaaatgagtcattatccagcttctgggacctggcaagcctgccctaagtgcggtcggcacgtccaccaacgccaatggggcacttatcagcaatgtccttattgtcactattggcaacgactgacgacggcgcaacgattagaacaactcgtcgacgaagggtcgtttcagccgttgacgatgactgagcggcctgtcaatcagctggggttcccggactatacgaacaaactgcggcgggcccaacgccagaccggattaaacgaggctgttgtctgtggaacggccttgattgagcaacaaccctgtatcttagcagtgatggatagtcattttatgatggggacgttaaacacggcggtcacacgtcgcttattgcatgctagtgaacaagcgcgggcccaacggttaccactgatcattgtgaccgcctcaggtggtgctcggatgcaagaaggtgtttatgccttggtcggaatgaatttgattctggcagaattagcacggttagcagcaacgccgttacccttgatcacagtgctgacagatcccactatggggggcgtatcggcgagttttgcgtttaagggtgacctgattatcgcagaagcgggtgctaagattggctttgccggagcccgggtcatccaacaaactttgcctgtcaaactgccggcggattttcaaacggcggatcagctgtttaaaaatggtatggtggatgcagttgttgaacgacctcaattgcggtcaacgctaggacaagcattagtgaattatggaattgggaggtcagcccatggataaacgattacagcgattacgggcggctgatcggatcagtgcgccgactatcattcaagcgttattgccgacaatgacgcaacaacggggtgaccgcttattaggtcaggatgcggctttaacggcgggctttgggcgcactgccactggtcgccaattagctgttctgggcgttgaccggggtgttgatattgcgagccggcgtcgaaaaaacgggggagcattaactgttcccggctatcgcacggcgttaagagtcgtaacccatgcggctaaatttgggtggccggtcgttagcttaatcaatatgccaggtgctgatgcgagcccccaatcggaacgctatggtcagagtcaggccattgcggacttgattgcggcgactggtcagctgaccgtaccgaacgttgttgtatttctcggtgagggccatagcggtggggcgttagcctttgccaacgccaaccgcattatcatgctagatgatgcacttttcaacgttgcttctcccgaggcagtcaccgcgattttacatgggcaacagaccagcagtgacgccatcgatttattaccaatgacagctagcgctttgcagtcgcgcggcttagttgacctggttattgaccatcaggatcagacattagtcgctgcgatcaaccaggcgattgagacccaacttgccgcactagaagcattgccggcaccggatctaattgaacagcgcgaagcaaagtttcaacactttttacaatcttggccggtcaattaaaaataatcatcaaaaaatgggcttctcagaatttttattctgaagaaacccattttttaatagttgcttagtactgattagtcgtggtttgatcttgagtcgtggtctggtcctgcgtcgttgtatcttgtgtcgtactagtgccataagtagtggtatcactagacgttgtggtacttgatgaacttgaactggaacttgagctacccgttgtaattgaagctgtctcagagaagactgactctgttaaattactgtttgagagtcccagcgctttacggatgcgcttcgaattcttgtaacgttctgacgaagaggcaacttgataagagagcccatcgatcgtcgcgtcagtaccttgaacggtatatgatttggcatggtgagacgcattcttgtacttcgtatcgagtgcgaccatgtcattccaagttaagtcggtgcgcatgttcttagcgagttttttcgtaatcttttcaatattggcaattgacccaagtgagttagactgactaaccatggccataataacctgccgttgccgtttttgacgaccataatcaccctgaggatcgtcataacgcatccgtgagtaatcaagtgccgctgcaccattaagtttgatcttaacgcctttcttaacgttggcattaccgtatttgaaagtcagcttaggtgtcacggtcacgccgcccatcgcgttgatgatctgttttaaaccacccatgttcagtaagacgtagaagtcaattggaacatccagtaacttctctactgacttgacggcaccacttgcgcccccaatggtgtaggctgcgttaattttttgtgattgcccatcgatcatcacttgcgtatcccgtggaatactagtgagcgtcatactttcttttttaggattgattgtcgcaacaatcatggtatcagtccgggctgagaagtccttgccgcgacctagtgcaccagtatcagttcccaacagtagaatcgagaatggcttgcccttcttaataacggcatcaacattccgaagcttggtcgagccggtcgactggtaggtcgtattcatcgtatccttagcggcattccaggtcttgtagccccaccagccacccgtaacgatcaacaggacaacgacgattagtaaagtaattaaccaaggacgttttttgtgtggtttcaaatgtgggttacgctgttgctgttcacgatagcggcgttggcgtggtcccatttcattatcattgttattttctgacatattcgttcctcatcactttagatttttccctcaatagtcattttatgacgtttagcaaatcattggtccttaaagttagtaatttaaaaagattttaataatcaaaaaattactggcatcagtagtaacacaattatagaacactataagtaatattgtgaccggcgtcaaacgtttccatctataaattacggtacaagccatcataaaacagtggtatacttgaataattctcattgaattattattttacatagcttgatagcgatattcaatgatgagcaatttgttaagaggggaagactgagcgtgcaaattttacagacattcgtgcagagtattcaaggtgtcatgacgatcatcgtgatgattgcagttggttacttgttggcacgctggggctggtttaatgaaagtgcgactaagctgattgcccgattggtcactcaaattgcgctaccagcctatatgattgcaacgatcacaaagcagtttacagcgcataaattattatcaacgttgccaggattacgttttccagttcttaatatggctattttgtttggcatttcgttcggggtgatgcgagccttaaatattaaaaagagtcatcgcggcttatttgcctccatgtttttgaactccaatacggtgtttattgggctaccggttaatcaagccttgtttgggaacagcgcattgccatacgtgttagtttattacatggccaataccaccattttctggacgctgggcgtttatttgattcaacgtgacggtactggcaccgctaagtttgacttgaagcagacactgaccaagatcttctcaccgccattactaggatttatgattggtgtcttgcttgttctaggaaacattcacgttccaaaattcttgatggatgatttctcatatatcggcggtctaacgattccgctgtccatgatctttattgggatttcaatggccaacgccgggttaagcagcatgcgcttcgaccgggatagcttgggaattttacttgggcgttttatccttgcgccggtactgatgacgctgatgcttattccaatgtcgattccattggagatgaagcaagtcttcattctgcagtccgcgatgcccgtcatgacgaacgcaccagttgtctccaaactgtacggggcggatgccgattatgccgcggtcatggtgacagaaacgacactattgagcctaatcgttattccgattttgatggtgatcgttcaagccaactttattcgttaattattgtgtgacttaaaattaaaagtacccgaatgcgtgccactagtgacaggcgttgcgggtgcttttttgctggttgttaatgatgaaaactcaatttagttcggtcaacaaggtttgaccaattagatactttctgctcagggccgtcccaacacgtctcgctggtagtttttgatgacaagctgatgagtgcgtgctggatgatggttgaggcggcaagatgccattgaatggttcaagcctgatgaaaattgttttcaaaggcaattaaaaattgaaaaaaataacgcctgattccgcgttaaacggcgttttcccgtggataaaagcgaggtagtatactgagctgatttgaaagtcacgtgaaaatggtgctatactgagaaccgttgcgtattaaattttgattaagaaggaagcgaacgtttcgtgaagaaagcatatctttacattgcaatttcgaccttaatgtttagttcgatggaaattgcgctaaagatggccggcagtgcctttaacccaatccaattgaatctaattcgattttttattggggcaattgtgttactgccatttgcattgcgggcattaaagcaaaccggacgaaagttagtgagtgctgactggcggctatttgctttaaccgggctagtgtgtgtcattgtcagtatgtcgctttaccaactcgcgattacggtcgatcaagcttcgactgtggccgtattgtttagttgtaatccggtatttgcgctattattctcctatttaattctgcgagaacggttgggtcgagctaacttgatctccgtcgtgatttctgtgattgggttgttgatcattgttaatccggcccatttgacgaatgggctcgggctgctattagccatcgggtctgccgtgacttttgggctgtacagtatcatctcgcgttatgggtctgttaaacggggcttgaatgggctgacgatgacttgttttactttctttgctggtgcgtttgaacttctagttttagcttggattactaagattccggctgtcgccaatgggttgacggccatcggtttgcggcaatttgctgccattccggttttggtgaatgttaatctcaactatttctggttactattttttatcggcgtttgtgttactggtgggggcttcgcgttttatttcttggcaatggaacaaaccgatgtttcaacggcttccctagtattcttcattaagccggggttggcgccaatcttagcagcgttgatcctccatgaacaaattttgtggacgacagtggtcggaattgttgtgattttgattggttccgtcgtgacctttgtcggtaatcggttccgtgaacgggatacgatgggtgcgattgagcagccaacagcggccgccactgatgatgaacatgtcatcaaagccgcacacgccgtttcaaatcaagaaaattaattaatcgtggacggtcagggtgatattaatcagcttgaccgtttttttgtggcaagcgcgttatctcacgtaacagctggttgtgactttgaaaaatgaaccaaatcgattatcataggaagtattgaagatagtaggtgggaaagagaatgacagaactagtattggttcgccatggtgagagtacggccaatcgggataatacgtataccggttggagtgacgtcccgctaacagcagtgggtattgcacaggctcatcaagctggcaagcgattacgagctacgggactgcagtttggcgctgtgcatacctcagtcctaaaacgggctatcgttaccgcgaatattatgttaagtgaaattgatcagttatggctgcctgagtataagacgtggcggttaaatgaacgacattacggtgccttacgtggtcaaaataaggatgtgactcgtcaagagtacggtaaggcgcaagttcaacagtggcggcggagcttttatacggtgccgccgttgttgacaccagctgaactagaccatgatcgacgttacaccaagtacggtgccgccgtcgaaccgcggggagaaagcttgaagatggcttacgaccgcatcatgccttattggatcgatgagattgcaccgcggctgttagacggtcaaagccaactcgtggtggcgcatggtagtacgttgcgtgcgatgatcaaatatttagagcatattagtgatactgggattgatggtgtcgaagttgctaacggggtgccaatttgttatcaccttgatcagcaactgcacgttatcggtaaagaagagtattaaatttagtaatagttctcctaagcggtacttttattgaaagtaagtgctaatctggactgcttttttagaccattatcagattaatcgagcctgagttaagagcttcagcagacgctgaagctcttttttttagttaaagtgttaaataaatgcccagtataagtaattataatcattgataataattgccgacgagtactcaaaaaatgatacaggtttaaaaagttgatataacagtgctttcataactgtttgagttaatataaatatttttaatgtaataaaatccttcagttttcataaataaatataatatataacttgtaatagaatggtgaacgctgtaacatatcagatggacaaagttgcgatttggcgcgtttgacagccaaaaatctgatcagaaagccgggtaacgttatgatgaaacataaaaatttattattattaattataatgagcttgggtttctgcgggatgctgttgatgtttgcgccacaaatcagtacgctgatcaacccgaatgcgtcgcgagttgaagcggataaggctagtggtcacgatacgacgcatgatcaggtctactacaatgatcagatggataactatcaatatgattatataaataacgggactaaggttttgaactataaggcccgttttaagagtcgggtcatcacgtatcggatcacgagtgacagcaaggtgtatcgagcgatttggctacgagccgtggaacgttggaataacactaacgcggtgaggttagttgaggctaaggaccaagcgaaagcccagattacgttgggcgagagtgaagacgagacggagacgaccggatcggaaatcggccggacttggcggacgtactatcaaagtggttcgcaaggaacaacttggatggattcggcgaagtgtgtgatttacacgaatcgctttccagccagcaatcattcggtagaatataagctgtccgttgcgacccatgaattgggacatgcactgggactagagcatgagaacaataagagtgcggtgatgtattaccagtcgcatcgagcagcacatatcacgactcgtgagattagtacgcttaagcagatgtataaataattataatagtgattgctataagtaaacgtaataataaaaaaatcgactaaactcacgcgagtttggtcgatttttttattgtttgttgttagtagttccttgagcggtagttaagtctaatgcagtccaaaaagcaccatcacgctaaagcagtgatggtgcttaatttagatggcccattaaacttaattaggctaatgcacccattggatcccaaggtgctaaaacagttggttcttcggcttgggctgcctttaagtcatcggacaagaattccttgttaacaacaacttggtagcagtattcgtccatccaagcatcgctcatgacgaagaagcccttagtcccaactttgtcgccccagctattttcaaccttccacttagttggttggccgtcaacgaggtcgacaccggtgataaccatggcgtgggtcatcagactttcgccgtaatcaagacgttcagccttcgacattgaaaggtcaacgtcgaataattcatctttactgtagacatcggtagccatgacccctttttggcggtcggaggattgaccaacatcacaaccaaaccagacactttggccagcttgtaattgcttgatggccaattgcttgaagtcggccatagacacgttcaaatgtttgacttcacggccacctaagacgttacctaacatttcaatcgtgtaggtatggttataaggcttgtcgtcggttggggcgttgatgattgaaacgtaatcgtccaaattccagccaacgtacttttcgaagaagctttgtggcgtcaagttttggtcgatgtggtattgtttcttatcatcacgatattcccagtcaaaatgtgaaacgggttcgccaaaggcataggctaacatgcgatagacttcgtttaacattttttctttgcgttcttgaatcgcgtcgtcactagttccggcagccactagttcacgtaattcaacggcatctttacgtaactttaagttaagtgtgctgttgatttcagccgattttgaactgttgtaagtttcaggcatgacactcttaggcacgataccgtacttctgaataatggcaacgagcatatcccattggccaccatcttgttgtggcgtggtcatcaaccaagcaactttacggctgctagttggttggtcagcggttgccaacacgttttcatagaaatagttcgctttttcgaacttatcccagaaaaaggtgtagttttgtgatagttcgaaatgtttcaagttgaatttttcagctaatgaatgccgcatcgtgtttaaagcggcgaacatccagcaacgaccactttgcttttggttcgcaacgtcacctgtatccaaatcaatggaaaatactggtgtggtttggctcatggcctgaatatcttgactgcttgctaagataccgttcttagtgacactacgttcgatgacttttgcttcgggacgttggtccaagtcggcttgaaagttagcaatttggttcatactgattgctttactcaaaagatcactctcctttaatctaattctaattgtatcggtttatgacgggtggggcaagcggggagtcgcacaaaactatggtcgcgcttcgataacctcgggaccattggcatgaccgacaatgacagtgttgaccatgtctaagaacaggccgtgttcaaccacaccaaccatgtgaattaaatcttcggctaaagcgtggggatccgtgattgggtcgatgtgtaaatcgatgataatattattagaatcggtccggacgagttcatcgttgactttacggaatactgggttatagccccgggcagccattttttcaaagacatgttggctgccgtaaggaatcacttcaacgggtaagccaaaggcacctaattgatggaccattttgctttcatcaacaatccacatgactttatcagaattgatggcaacgattttttcgaagagtaaggcggcgccaccacccttaacgccttggaaatcatcggcgatttcgtcggcaccgtcgatcgttaagtcgagatggtcgacttcgtcaacggatttcatcgggataccgagcgccttagcttgggcagcggttcggtcggaggttgagacgccgacaatgtttaaatgttcatttttgacccgttcacccagagcatcaaccatgaatttaacggttgagccggttccgaggccgacctgcatgccgtcttgaatgtattcaacggctttttgaccaacaagttgttttaactgatcctgattcataatatgaattactcctttgattgagaactagtgactaatacgtcggcagcttcagggtgccgatcaaagtaagccttagcgtaggtacacagtggctgaatacgtttgtgttcaactcgagcggcgtcaataacggctttggttaattggccggcaatgccctgatgaccaaaatcgtcacgaacaaaggtatgttcaatgacccaggtctgatcattattgatggcggggaaggtaatttcaccagccaacttgccgtgatcgtcattaaaataaaagcggtgtgcttcacgcgtgaattccattgatttcaccaccttgtaaagggttttatatctaccgtaattaaaccggtaattgcccgttttgtcaacgaaacttctataataaaagtatggtaaaatgtgaacactaaattaatgttgagaaagtaggaatttgaaatggcacggggatttgaaattgtaagtcaatacgcgcaggcggggttacatgtaccttaccgcactaccaagcaagcagctggctatgacttcgaagcggcggaagattttacgttaccgtcaatttggaaaatgaactttatcaaagtactttggcaaatacatcatggtgaaacgagttctgcagccgatttggatgcggcggctaaagtccttaaaccatggcttgttccaacgggtattaaggcatttatgaatgatggcgaatacttactattagccaatcgttccagcaaccccttgaagcgtaacttgattctaccgaatgggattggcgtcattgacgccgactactataacaatcccaagaacgaaggtgcgattttcgtccaattaatcaacatggggattcgcgacgttcacattaaaaagggtgaacgcattgcccaagggatttttaccccttatctgactgttacggatgaaacgaatgtgacaacgacacgttctgggggcttcggttcgaccaataaataggaaataataaaaaatcggtaaagccaaggtgatttaaaggctttaatgattaataatggtaaaataaacttatgattgtgaatacccatagcatgaaaatgacgatccagttaattgagtttgattgattatgtaagtctgcatcgtgctggctgtttgtttagtaagaatcatggttaaaaggtgccaattagatagatttctgttcgtctgcaatgactatcctattccgacctccgggactgggtgacaattgctggaacgtaagccgacgtcgatttgagctaacgcataacccgcgtcatctcaaatacgagtcttattctaagccggaagaaagacacttccgcctaagaataatttggctactgagcattgtcacccagcccctccagccgggaagccgctcgaatggcaaataaacggccgcttaacttggtacaattggttgctgactactttgatacgaaaactttgagcgaaacatcagaatgtattctctactttgtcgaaacgttcaatgtattatgactggtaactcagaaatagtaagtcatcacaatatcattttcggcctgacagttgattgagaaaattaccgtttatgaaaaacaacgaccaattcatcaaaagttgagtacatcttcatcagctattcgaataccatcccgactggaaggtgtttctgacaatgcccagtactgcaagagtgtgaagtctcagtctgacccgaacacgtttcaccaatatggcataaaagcgtgaaaggccagtatttaagacgtgggcttcggctcaaatctgtgcccaccgcgttccggcaattggcagaaatgcctggaggtcggtgtaggacgaattaactaagcaagtttacgctaacccggactgtttccagcgggcctaagctggctgcttttaaatttaaaaaacggcacgttttaatcatgactcatgacagtgtgacgcggatgaagtaattattttagaaattccaatacccaacattaaattgatatgttggcggagaaatggagacgtgtgtacgtggcaaaagcaaaaactcagtttgtttgttctaactgtggttattcaacaccgcgatatttaggacggtgtccgaactgtggtgaatggaatacactaactgaagaacattttgatacaaaaccggaccgcaagtcgcgggtgagctttgcgggtaagtcggctaagccacaacgactcaaagaagtgtcgctgactaagacaccgcgtgtcaagactaagctgaaagagttcaaccgggtcttaggtggcggtgttgtgccaggttcactagttttgatcggtggtgatccaggtattggtaagtcaacgttactactgcaagtttcggggcaattggccgagacgggtggttccgtactatacgtgactggtgaagaaagtgcctcccaagtgaagatgcgggcggatcggctggctgttagcagtgaagacttttatctttatcctgagactgatatgtcgaatattcgttcaacgattgaatcgacgcatccagaatttgtggtcattgattcggtacaaacgatgcaagaacctgatatggactctgcgattggttcagtatcacaaatccgtgaaattacggctgaactactgcaaattgcgaagactaacggcattaccatttttattgtgggccatgtgactaagggtggtgccattgcggggcctaagatcttagaacatatggttgataccgttttgtactttgaaggtgatttacatcatacgtaccgcattttacgggcagtcaagaatcgattcgggtcaacgaatgaactgggaatatttgagatgcggacgggcggtttgtatgaagtggccaatccgtcagagatcttcttggaagaacgtctgaaggatgctacgggttccgccatcgttgtttcaatggaaggaacacgaccaatcttagtagaagttcaagcgctggtaacgccaacggtctttggtaatgcgaagcggaccgcaagtggcttggatcataatcgagtctccttgattatggcagtgttggaaaaacgggcgagtctaatgcttcagaaccaggacgcgtatttgaaagcggccggtggcgttaagttagatgaaccggcgattgacttagctattgcggtcagtgtggcttctagttatcgtgaccagcagactcgtccgagtgactgttttgttggtgaagtcggtttgactggtgagattcggcgggtcaaccggattgaatcacgagttggtgaggcggctaagctaggttttaaacgtatctttattcctaagaataatctgcaaggttgggatatcccaactggaatcgaagtaattggagttgccacgctaaaagaagcgctccaattagcattacaacaaccaaattattaaaaaggggctgatgccatgaagaagttaacggtgcgactagtatttattgtcgtcgggggtacgttaggactaacttacctgccgttcttgtggacgacaattttgtcgcaaccaaatgtgttattgaataacgtttttaccaactttttgttgggggcgctgattctatgggttttgtcattgttcttagccaatgccgctgtacgactggtggatcgagtcgaaaagaacttatccaagcaaaatccaatgacacttttatttggcagtatcggatttattattgggttattgatcgcggttctgatttcgcaattatttaatcgtagtccattattcctattgaacacggtcgtcccaattattttgatgttgttttttggttacattggtgcgcgagtcgggactacccggatcgacgagtggcggaaagttttcaacttccgccgtcgtgaaaaggaaacaagtccggagattactgatgctcagccagatcagaactatcatcattataagattctagataccaacatcttgattgacggccggatttacgacattgtcaagactggtttcttagaagggacactgttagtaccgaactttgtcttgtatgaattacagtacattgcggattcagctgatagtattaaacgtgtgcggggtcgtcgcgggctagatattttaaataagctacaaaatgaaaatattatcccggttgaaatgtacgagggcgattttgaggatattccagaagttgatagtaaactcattcaattggctaaaaaagtcaacggtgtgatcgtgacgaatgactacaacttgaataaggtgattgagttccaaaacgtacaagttctcaatattaatcagttggctaagtcgttgaaaccacgggttattcctggtgaagagatgaatgtcatggtcgtcaaaaatggtagcgaacgccaacaaggggtcggttacttggacgatgggacgatggttgtcgtcgaagatgggaagttttacatcaatgaaaaggtggatgtcgttgtaacgagcgccttacaaacggatgctggtcgaatgatttttgcccgtttagcgcacgctaatcgcggaatcccggatcatgcggatggaaataataagcacaacaataatcatagtaataatcgaaataataatcgcgataatcggcactaggttaagcgattcaacggtagcaactcatttgatgggggctaccgtttttttgttcaatgatgactaatccaggacgtcgtaagggaggcggccgaatcgcaacaaaataggagggttaatgctcattatcaataaattgggatgttgttagtgtacgattagggcctgtttcgatatttttacaatgggttcagtctgaaaccttaatttttagcggtaaacatggtaaactggaaaagcaagtgaaagtcggaatattctggtcgatagaaaggttccggcgtaacatttaagatgaaaaaatacgaaagaggcgttaatcacattggcaaagagcaagattcgtgtgcgttacgcaccaagtccaactggccatttacacattggtaatgctcggactgcattgtttaactatttatttgcccggcataataagggaaagttcattcttcggattgaagacaccgatttaaagcggaatgttaaagacggtgaaaagagtcagatggacaatttgacgtggttagggattgattgggacgaaggtccggataagggtggcgactttggcccttaccgtcaatcagaacggaaatcaatctatgacccgttgattcaacaattaattgatgaaggtaaagcttacgaatcttacatgacggaagacgaattgtcggcacaacgtgaagctcaaaaagcgcgtaaggaaatgccacactacgtctacgaatttgctggcatgacggaagacgaaaaacaggcgaagatcgcggctgctaaggcggctggtatccaacccgttattcgcttccacgtcccagaaaatacgacctatgcttgggatgacatggttaaaggtaaagtttcgtttgaatccaagacggttggtggcgactttgtcatcaagaagcgtgacgggatgccaacgtacaactttgcggtggttgttgatgaccatatgatggaaattagccacgtcttccgtggtgatgaccacgttgccaacacgcctaagcaattgatgatttatgaagcctttggttggcaaccaccgaagtttggccacatgagcttaattatcaataccgaaaccggtaagaagttaagcaagcgtgacgaaaccgtattgcaatttatcgaacaataccgtgaattgggttacttaccagaagcaatgcttaacttcatcatcctactaggatggtcaccagttggcgaaagtgaattgttcagtaagcgcgaattcatcaaaatgtatgatgaaaagcggttgagcaagtcaccagcagcttttgatggcaagaagttggaatgggtgaacaaccagtacattaagaaggctgacgaaaacgaagtctttgcaatgtcaattcgccaattgatcaaggctggccggttaccacaacgcccagatatgagccagattgaatggacacggacgttggtttcattatttaagaaccagatgagctatactggtcaaatcgttgatttagcagatctcttcttcaatggtccggctgatatcaatgatgaagctaaggccgaacttgataatgacacggcactccctgtcttgaaggaattccggcaacgaatcgaagatattgacgtcttcgaagcaaccgcaattcaaaagacgatcaagagcattcaaaaggatacgaagatcaagggccgggcattatacatgccgatccggatcgccgtttctcacgaaatgcacgggccagaattaccagaaacgattgaattattagggcgtgaaacgaccaagaagcatctcgatgctatgattgcggaactcgccaagtaatgaatggattattaaaatattagttggttgtcgtaagtggcggtcgtcgtcagcaagacaacgcaattaatacatcgtgtggtcagcaagctagtccccgggtgagcgttatctcagtatcgcgaaagttacccagtggcgcgtgactgcatatgaaagtatcttttgtatggtggagtttcggttccgccgtgcgagggatgctttttatttgtgtttcaaacatggtaaactatcatcaaaagtaatgattcaattgaaaggagttgtcgccaatatgttaagtgtttttaatacgttaacgcgtcaaaaagaaccgtttaagcctatcacccccggagtcgtgaaaatgtatgtctgtgggccgaccgtttataactatattcatatcggtaatgcgcgttctgcaattgcctttgatactatccgacggtattttgaatattgcggttaccacgttgactatgtctccaacttcacggatgtggatgataagctgatcaaacgtgccgctgaagatcacaccacggtaccagcagttgctgaccggtttattaaagcttttatggaagatacgactgcggtcaatattgaaccagcgacggttcacccgcgggcctctgagaatatcccagaaatcattgcatttgtacaagcattgattgaaaagggctatgcttacgaatcagctggcgacgtatattaccgcgcacggaagtttaaaaagtatggtcagttatctgaccagcgaatcgatgatttagaagtgggtgccagtcagcatactgccgatgaagaaaccgatcgtaaagaagatccaattgactttgcactctggaaagcagccaagcccggtgaaatttcatgggaatcgccatggggtgcgggtcggcccggctggcatattgaatgctcggtcatgtctactaagtacttgggcgatacgtttgatattcatggtggtggtcaggaccttgaattcccacatcatgaaaatgaaattgcccagagtgaagcgaagaccggcaagacgtttgccaattattggttacacaacggttttgtaacggttggcgatgacaacgaaaagatgagtaagtcattaggtaattttgtgacggttcacgatattattaaaacggttgatccgcaagtgctacggttcttcatggcgacgacccagtaccggcgaccgattcaatatacgcaggccaacttagacgaagcagctaataacttggataagttacgtaatgcttatcgtaatctcacgttccggttgcaagatgcgacgaacgggacggatactgcggtggcagaacagttacagacactcatcactaactttggaaccgcaatggatgacgatttcaatgttcaaaacggggtggctgctgtgtatgaattagctaagttagccaatgtctatgcagcccaggcaacggttcaaaaagagacgttgattgccttacagaaggcattagtgcagttgactggcgtcttcggcgtcacttttgaaacggctaatgcgacgctggctgatgacgcgattcaagcactgatcgatgaacgagaagctgctcgtaaagctaaggattttgctaaggccgaccagattcgtgatgatttgaaagctcaggggattattttagaagatacgcctcagggtgtgcggtttagaaaggaataatatgcaagttgattatcaacaattaaacgggattgcactcgcgtacctcggtgacgcggtgtatgaaccgtttattcgccaacatttgattgaaagtggttttactaaagccactaagttgcaccaccacgcgacccactatgtttcagccaaagcgcaagcggcactgatcgaacggatgcaggccgaagaagttttaacgccaactgaagtggacgtttttaagcgtggacggaatgccaagagtcatacgtcggccaaacataccgatgtcgtcacttaccggatctcaaccggttttgaagccgtttttgggtatttacaattgactcagcaggcggaccgaattgcagaactggcacagtggtgtattaaacaagttgatgaagggagggtttccagtgtcaaataacgaacaagaccaaacagcagctgactttgtaatcgggcggcaccccgccatggcagcaatcaagagtgatcaacagatcaacaaagtctttattcaaagcggtctacaggccgatgtactgaatgacattgccaagattgcgaagaaacgtaatttgatcgtacagtacgtgccgaaacaaaagttagaccgtttaaccgacaacgccaaccatcagggggtagctgtgggggtggctgcttttgaatatgccaccattgatgatttatttgctgttgctaaggctaagaatgaagcgccatttttcttgatcttggataatatcgaagatccccataacttaggttcgattatgcggacggccgatgcagctggcgcccatggcatcattattccgaaacggcgcgccgtggggttaaccagtacggttgccaagacgtcaacgggggctatcgaacacgtgaaagttgcgcgggtgacgaacttggttcaaacggttaaacaattgcaagaagccggtctgtggatctttgggactgatatgaacgggacggactaccgacagtgggatgcttccggtgccgttggtttgattattggtaatgaaggtaagggaatttcaccattacttaagaagagtgtggacgaaatgttgaccattccaatgattggtcatgttcaaagtttgaatgccagtgtggcggccagccttctgatttatcaaggctacacgtcccggcatccactgggaaaataagatgaaacaacaattattgattgtcgatgcttacaatatgattggcaactggccagaactcaatcatttaaaacaaacggaccggttgccgcaagctcgtgacgagttaattagcatgttgactgagtataaaaaaattacgggccttaatattagcctggtttttgatgcgatgtacgttccgggtaattctaagagttatcgccaagctgatcttgagattatttggacgagtaaagaccagaccgctgacagttatatcgaaaagtacgcgggtgaaaagcaatcgcgagtacttcaagtgacggttgcgactagtgatcaggcagaacaatgggtaatcttttcggaaggtgcattacgagtaccagccttggaattacgacaccgcgtcaagactgcgctgaaagatgtgcgtcatactgccgtgcgcacccaggatttaggtgccgttcgtaaatcaccctggaatgatgatcaattatcggccttggatcagtaccgccaacaactagaacgcaatcacgttaaacatcatcacaggtcgtaattaggtggttgccgcgagcgtgggctgtttctaaatcgtcataattaatatttaaattttgcaaaagataaccagtggcaatttaaggctcgaaagcagttctagtattaaaatatctagtaatcaaatgccccagttcagctgctgttcactagatgttaggatggcttgtcataacagttttagtgttatcggagtttgcgctggcgattgcattaatcggttggttagacagcgtagtggcttcgtgcaactccagcggacgcgcgtactcgtctccaacgggcttaagtaggtcgcacttgtctttggcgttagcaatattttgatattactaataattagtgcgatatagcactattaggttgatgaatgggacgatcatagtagttttgatagccgcgtataagaagatttctgtgagtgctgaggtggctgaattgaaacgttcgttcgcttgtgacggcacaattaacccggtatattagcattacagatgctcaggggtgcagtttctgaaactagtcagaagcgaggaatgtcacgtgaatgaacagcaattgatccacttagcagcagatggtgatgatgcaagcattaatgcattagcccagcagtatgtgccagttgtttggcggttgcggcggcaatactatgtccggaactttgacgaggatgattggcttcaagaaggtcgaattgcagtttatcgagcggctaaaaagtatcaacggctacggcaatgtagctttggcacttattaccgggtgctattgagtaatcagattattgatcatattcggcggacacaggctcgcaagcgtcgtccggaaggggatatcttatcactggatgttaatgatgaggatatcttatgcaatattcagacgctaagggcctcgacccttgatgtggttcatgttcgtgagcaggtgcggatttttccagcaatctgttcggcatttgaaggattggtttttatggatctattggcagggcaatcgccagaacggattgcattgagtcggcaagtggaagttgatcaagtggtcaacgccacggatcgatgccgcaagaagatgcgtgactttttacaagacgctgcctgaaattgacattcgaaaagttccatgctaatgttatacctgatttattatggaggttttgtcgatggcacagaaaaaagttgcactggcatgtaccgtttgtggttcgcggaactacacgattgatgctaacccgaatcgaactgaccgcttagaagttaagaaattttgtaaatattgtggtaaacacacacttcatcgtgaaacgcggtagggggattagacatgcgcttatttaaattttttggtcaagttggacatgaaatgaaaaaagtgacctggccaacttggcgggaaaatcgtcgtgattcgtggacagttgtctcaacatcactgttcttcgtggcgtttttcgctttatttgattggattatccaattattattacaaatgttaacaagctggcattaatggctttttgaacaaatttttgttataataatggcattgaaagaaaacttcgtgcaaacgaggtttttttattttgccaaaagacattttaaaggagaataataatggtcgagtctgttgagaaaagatggtatgtcttacatacctacgctggttatgaaaataaggttagttctaacttggaatcccgtattcaatctatgggaatggaagacaatattttccgggtcgttgttcccgaagaagaagctcatgaagtcaagaatgggaaagacaaagttgaaatgaagaagatcttccccgggtacgttttggttgaaatggtcatgacggaccaagcttggtatattgttcggaatacgccaggtgttactgggttcttaggatcacatgggcaaggtagtaaaccaacgccattgttgcctgaagaagcggaacaaatcttgcatcaactaggcatgagtgctcggcataccgaattggacgttgaagttggcgaacaagttaccatcatcgatggcgctttctctggcctttctggtgaaattactgaaattgacaacgaaaagatgaagctcaaggttaatatcaatatgttcggtcgggaaacaagtactgaattggacttcgatcaagttgaccagattcggtaattaatttaagtaagctggtggaccatcttggcagaagtaattttagtcatcatcggcgccttagtgctcggtattttggggcgtatcacctttaaattttggcaatacgggcgaccgcagcatttgcggcagtcggtgtcggctaattcagcagatgatagcgccgtgacgctatttattccagggtatgcgggcaaccggttctcttttggtggcatgctccaacgttttacggccgggggcatcgccaataagtcattagtcgtaatgattgatcgacataatcatccccatgtgactggtgagctagacgcttaccgcccaatggtacagttgatttttgccacgccacgcgttgctgtacggcaacaggcggcgggcgtcttggcagttgtgcagtatttgattgcgcatgagcacgttcagacgatcaatttagtcgctcattcgatgggtggtgtggtgctctttcaatacttgacgacagctgccaaactggtcaatttaccggaagtccgcaaggttgtcacaattggtgcgccgtttaatgatagtgaggtcgggcagaatacgtatccgattgaaaaccacccgttgacggcgaccggaccaactaagaccacgcccgtttataattattttttgcgaacgctccaacgattgccaaacacgatttcgtatttgaatattgcgggtaacattggcgatgcggcgcaaagtgatggtgctgtcgctctgaatagtgcgttgtcattgcgctttttactgcgaccaacgcgtgaccagtatcaagaatttgtggtacatggtaagaatgcccgccattcacgattacatgaaaactatgaagttgatcgccaaatcgtccagtttttatatccagaagccacaaaaaaggttgctggtgaaaaatagatatgctacaatgatgtttgtgcgtcacgtatgcacgtttacgtgggaggagcaaaaactcagctccatttaccacatcacggactaaggaggaatgtctcgtggctaaaaaagtagctaacgttgttaaattacaaattcctgcgggcaaagcaacacctgctccgccagttggcccagctttaggtcaagcaggtatcaatatcatgggtttcacaaaggatttcaatgctcgtactgctgatcaagcaggtatgatcatccctgttgtgattacggtgtacgaagatcgttcattcgacttcatcactaagaccccacctgctgccgttctattgaagaaagctgccggtgttgaaagtggttccggtgaacctaacacgaagaaggttgcaactgtaaccaaagatcaagttaagcaaatcgccgaaactaaaatgcaagatctaaacgcagctgacgttgaagcagctatgcgcatgatcgaaggtactgctcggagtatgggattcaccgtcgaaggctaattcagtactgttgagtatgtcggacacttcatcaaaatgaatgtgtcaagtgggaggaaatctccgtttgaaccacatttgcaaggaggaaaacacttagatggcaaagaaaagtaaacaataccaagacgccgctaagctcgttgatcgtgacaaagcttacgatgtaactgaagcggtagacttggttaaaaaaatggatttcgcaaagtttgatgcaactgttgaagttgccttcaaattaaacgttgatacaaagcaagccgaccaacaacttcgtggcgcggttgtccttcctaatggtaccggtaaagatcaaaccgttatcgtttttgctaagggtgacaaggctaaagaagctgaagaagccggtgctgactttgttggtgaaactgatttagttcagaagatccaagacggttggttagactttgatgtcgcaatcgctacccctgacatgatggcccaagttggtcgtttaggtcgggttcttggacctaaaggcttaatgcctaaccctaagactggtacggttacgatggacgttgctaaagccgttaacgattcaaaagctggtaaggtgacttaccggactgaccgtgacggtaacgttcacgttcctgttggcaaggtatcattcgatactgacaagttagttggtaacttcaagaccattgaagacaccatcgtgaaagctcgtccagcctcagtacgtgggactttcatccaaaacttagttgttacttcaacctttaccccagcggtacgtgttgatttagcatcattttaaggattaaattctgaaaacaattgaccccgtgggtgatctgtgatagattactagaggttaagtaatatctctacctaagactcaggcggcttaacggccttaatctacctgccgaggacattgttttttctctatgtcttggtggacatagggatttttttataaatccctgaaccaaaattctgggaggtgaatctgttgagtaaagaaacaattgctgttaaagcacaagaagtcgaagaagttgcagaacaattgaagagctcagtatcagccattgttgttgattaccgtggtttgactgttgaacaagtaactgatttacgtaagcaattacgtgaagccggtgttaagatgcgcgttatcaagaacaagatcatggtgcgtgccgctgataaggccggatttgaagacttaaaacctgtatttgctggtcctactgccgttgccttctctgaagaagacccagttgctcctgcaaagatcttggctaacttcgcgaagaccgctgatgcccttcaattaaagggtggcgtgatcgaaggtaaagttgctgatcttgaaactgttcaagaatacgctacgatgccatcacgtgaagaattattggctacgatcgccaacttgttacaagcacctgttcgtaacgttgcatacgctgttaaggcggttgctgaaaaaggcgacgaagacgcagcttaatttgctgtcagtgtgttaaaaaaactaaaatataagttcatataaaatggaggaacaaaaaatggcttttgataaagatgctattatcgactcattaaaagaagcttcaatctcagatttaaacgacttagttaaggctatcgaagaagaattcgatgtctcagcttcagcccctgttgctgttgccggtgctgctggtggcgacgctgccgctgctaaggattcatacgatgttgaattaactgaatccggtgaccaaaaggttaaggctattaaggccgttcgtgatatcactggtcttggcttgaaagatgctaagggtcttgttgataacgtaccttcaatcatcaaagaaggcgtttcagaagacgaagccaacgatatgaaagctaagcttgaagaagttggtggtgtcgttacccttaagtagtcaaatacttgaaggagcgtcatcagaccggatacaccgttgtaatgacggtgtatccggtctttttttgtggttttattcccgactaatatcgatacattattaccaattttgggtacagaatcgggtacatgttttttttgtaccataatttttacaaactctgtttttcattagtcgaatttcctaaaagattaggagccatgccgttaaatacattaagtgcaccacgtacattttcacgtgtgtaactttgcgtcatttgtaaagatgaatggcctagccagtgcatcacatctgtagcaacttgtccgttagtgagggccatagtagcaaagtaatgacggaagatatgtggagtaatatgaattccggctgcttttcccaccgtatttaagactttattagcttgctgcacgcccattggcatacctgttttttcatttacaaatagaaaactgtcaggatctaatgttctgtgagtcttgttataaatattttggctataggtgatagcgtaatggcaaatggatagcatttcaccacgaacatatattgtacggtagcttgagttattctttaagtcaccgccttctggttctgcgttggtacggcctttcttgaattggattgcacaaatttcttcatcattccattgtgagaacttaaaagaattgaattgcagtcccattagttcttcgcggcgttcgccgagtgtcagtaaagccatcatgcagtattgatatttagacaatacttttggtgctactttcatcaattggttatactgcttttcagtaatggtctttgttgaaggtgatttgccgccatcaattgaaataccgctgagtttatttttgacaataacatcattgcgagcagcatcattcatcaaaatttgcattacagaattagtcgtaataatagtatttttagcatagccatctttaatcatttgatcaatgaaattctgatagctctgacgtgtaatctcattgattttttggttaccaaagatgggctttaattgattgttccagtagtttttcttttgagtaatggttgcaggtcgccaaagcttcaagtcaatgtttcgttttaacactttgtcaaagtaagattgcaaggttattgtgtctgatattgaagctgtaatttggcccgttcccagggttacctcaaatttttttaattcaatatccgcttcacgccaacttgcgaatcctgatttgctccaactgcgatatttatgatgaatatcagtgtaggctcggcgaactccatattttttaccccgtttggtatcatactcataaattccaggatgtcgttttaaaggtttccattgtcgtggcatactcatcattcctccaattaaaatcatttgaacatatgttcttttgagttcgaaatatataccccaatgaaggggtataagcgagtgacgggaatcggacccgcgactacagcttggaaggctgtcgttttaccactaaactacactcgcgtgaatggaccttgttggactcgaaccaacgacaggacggttatgagccgtctgctctaaccaactgagctaaaggtccaatgaactctgcgggaattgaactcgcaacctacagtttaggaaactgttgctctatccagttgagctaagagttcataatgcgagcggcaggagtcgaacctgcgtgatattttaagagtgggggctcctaagatgaactctgttctaccgttgaactacgctcgcgtgaaagcccgggcaggggctagttgtacttagcattcagattatccgtattccattctgtagcggccgagaagtgttagttatttggcagctctaaagttattgtaccaagtttggcatcattattatctggatcaatagcttggatttttacaggatattcagtattgtccaattcatagctccccatacactttacttcggcacctggtttaactttttgtgatgcagctttttcaagcgagttccattcatcagagtcctttgaaggattaccgaggtccaagtcattgattgacgttttactttcttgagtaaaatgagcaccctcgataagtgattcagttggctcaatatttttattcttagaagtatttttgaatgtgtagtagacaatcaagtcagtgccactctcaaaatgtggtgtggtttctgtcgaagtaattgtgattgtataattggtagttcgaattgttttgccagaaacgcctggcattgcatttattgcttttgttgcactcttaattgcggtatttagttttgttggagcagaaatattaaactgttttcttattttttgactcaataatgcttctcttgaaattaagctatttccttttttatcaagcttaagttgtcccatgtagtcatcaattaatgtatgtgaatattgcactaattttgacatattggagacaccgtcttcactcttatgctgttttaaagtagctgcatttttagttagcaccgtatctgcgctgttaactgcatctgacatttcgttatcattatttttaattgaatctgtcaacttactccaaacatcagcctcagcattcatagtagtgttataaattgctgttatttgtttgtttgtaagctgtttagttgctgttttgctagtatcgctactattttggttagaactacttgtacttgtgttggtacaacctactaagccaaatgataacaatgtaattcctaaaattagtccctttttcaattgaaactcctccaaatagaaatccccatgataattaaattttaactcacattacaaaaacgaaagaaattccaaaaattcatctggtaatccgtacgcattttttagcgcattgaagctatcaggtaattcatcgtattgttcttcgtatagcttcgccaattcttggcatgcaaaagcattagccttgtactcagcactattcttttgatagtccccaagcgtgtaccaagatacgcaagcggtgtcctctataccatggcataattcgtgggccataactgggagcctggctggtgaatcacgaaggctatcgctaattattatatctgtggtccccaagattggagtacagacccccatatttgctccaatgtcctcaaagtgaacttcgaatcctaatctgtctgcaatcgtaaatggatcatacgttccaaaggattgcgcaagttgttctaccttaagatacgtgtcgtatcgcatgcaaacacctacttttttccctcttcacgtaattttttcaagcggtcccagtaaattccctcaataacattacggactttttccttatcctcaggttccatactcattccaccatatcccataggtgtgtttgattgaagcagcttgtccaaatcaatacgatcagcttctgtagcccagtctggtgatttatgatttgtttcgctatttccaagaagatagtcagtggatacttcataatagctagcaagaagttttagtagttcgttgtcgggttcgttacgttcgttttccaaatgtgaatatcgagctctactgataccaattgattttgcaacctcatcttgtgtcttgccttgcatatttcgtaatccttttaaacgattcccaattcctgaagatgccatagtatcgcccctttcttaattgatattatatgtatcagtatagatacatcgtgtatcggtttcaatcaatgatacaaaaagtttccgaaaacgcttgacgatacttaaagtatcgtttattataatagttgttgatacgatatgtatcggatttggaggtgcaaaaatgaagcgtgagcgacttattgcagaaagaaataggaatggttggtctcaaaatagtgttgcaaaattacttgatattgcggaaataactgttcggagtatagaaaatggatcgcgcaaccctagtagcaaattaattgctaaattttcatatctttttgaggttaaaccagaaattttgtttcccgatatttttttgccagataaggatactaaacgtatcataacggcaaaagcatacaaattgacaaaggaggcggctaaatgaaactaaaagcaactctaaatgatgacggtcatcacagaattgcttgaattaatcagatattaagttaggaggcaaagcctaaatgttaaaaaagatgaaacttaaaagcattccatattttgaaccaacgaaccgagtggttgagagtacaaattttgtaacgattgacggtcaaagagtgttgtatgtgaactctgttgaaagaaaacaggtaggaaaattaaccgaggttacattgaaattttatacagattcattttgctatttatctaaagagaagtttagccaccgctttagaaatagatgttggcgtcatcggcaatccgtcttctacaagaatttgtttggcttctttcagaagactcggtttttcaagactcgataaatattgatgaccattcattgttaatctttcaattgataccaacgatcccatcttagtattgacaaccgtgcctttaacaaggccactttggatttgttctatggctatatcgatacaatctttggcaaaatcagaagtaacttcatgatcataactattttgtgtgagaaacgatttaatttcaggattctcttgaagctgtttgatcaattcaaatccgttctgaggatgaaactgattgatagtttttaacacaattgcatatgttgtaaaaggattcatattattcacctccttgcaaatattatatcgcaaggaatgaacaaaaggaggcagcgaagtgaaacaggataagcctgttctgaaagttgaagcagaattgcaaaacattgaacaagtaaaagagttgctaccgcaaatagcaactcttcaaaagaaatatgatgttgatttgaccatcaattactttgcatcaactttagacacaatgtcataaaaccccttatatgtgtctttaacatattctacatccatatctgtgtgtgtatgcttagcctcaatttgagtatttttatggtttaggtacgctttggtcaattcaagtgcaatttctttatcagtcataaatatcacccccttatgtcaattatcgcataaggagcgaataaaactattaaattttaaaagaacggaggtaacaacatgcaagcaattaaaaaccgcaaacgtgaacttgttgattcaatcatcgaactgctaccagcagtgtcgccaaatttaatcaatgctaagacattctggatgtctgaagacgagcttcaagagctaatagatatgattcacgacggggatcggaacgagttctacgaaatgattaattcttaattatattatccggcgtttttaattcaggttaaacccataaaactgaaaggtggtgatggaatgtcaacacagtctagctcagtatttgcaggtagcacgttgactgatgtaatgaatcataacagcgtagcgcctattgaactgagcggcaaggtaggctactcggtaacgttaatttacaaacaaaggcatgatcaggcccgcattcgaatagaatcggtaccagcatttctagcagcattgcctaatcaaaatcaattctttgcaattgaacttgctcatcgatttgtcggtgttacgacaccagtgattgatggcgaccgaattatgaaggagccattagcaatggctgttaaaacgatgccagaattaagccaagcactagcggctattcaggattcacttgatgaactaacgatacctaaggaggacttaaagccaaatgactttgatgatcctaagaagctagtcgctgagtgttttgatgcagtgctttacttgctaaacctaatcgcatatgtatgtcgtggctttgatttgtctatgcaagatcagcttaaacagcgaatgaagaaatggtttaaagatggcgttgttaaacataggaaggagtgatagagatgatgatctcaatgcaaaatgacgatactgagtttattgatgctgtagccgttgctgtagctgatagaatcatgccacaactggaagtgctggtgaagaagtattacacaccggatcagggattaaaccaacagcaagctgctagtatgcttggatgcagtgtggatacattaaaagatttttattactatcagcctggattcccacatttcaagaaggggacaaaagattcattttcacaaaaagctttagaaaattggatgtctgacaaccaaatacgagcgtaaggaggaaatagcaatgattacattaccagattgggtagcatcatcactattaactttagtagtcactatattgtggtacaaacgtaaaaatattccacattggtttggtatttaaggagattaagacgatgaaatttacattcaggattggaaacgtgctttacaaacagatcacgattgaagaattgaataatctttttaaaaaatttaaggaggtcgaacgaattggaagtacgcaaagtatcgctaaagcctaaatttgagtacgaaaaaagctgctcacgtattggtagtacgtggacagctaagacgcttaataattttattttcgagttctattgtactccgaaactatcgttaaaacaacgtttagcacggaggtgggcaaaatgaacggctacgatagctggttaattgaccaagaagaagctgcggaaggctggcgtgatgatgtgcccaccgaggaagacttaatctaaagtggcgtcattgctggatattaaataggaggatttcaatcatggatgcaatgttaaaagaagaacttagaacggtgacagaacgtgaaaacgaaggcttcaaaattgactcattggagaaagctgactgggcgttaaagaagctcaaggctatccaagcgcatgatgatgaaattggccaagttgcgaagaacaatattgaccaggcaattgcatggcgcgaccgggagcttgataagaaccaagccaaccgcgagtacttcgaagggctactgaccgactatttacgtgatcaacggttagtcgataagaaattcaaaatcgatacccctaatggccgtgtatcaactcgtaagaacccggctgggttggcgtatgacgaaaagatggttttaaactcacttcgtaatcagggcatgagccaatatatcaaggtcaaggaatctattgataaagtcgatttaaaaaaagctggtcgcatggttggtgacaagtttgtcatggaagatggcgagattatcgctggtattactgaaaagcccgcaactgagaaggtcacgtttaaatactaggaggaaccgatatgagtgaagcaatcgcgaaagcagaaaatcaaacgaacagtctatccctaattatgggtacagatgccaatcggatggcaactgaactgcaagctatttccaatttccaaggcatggttcaacagcagttaaaaagtggtcaggacttcggtgtggtcccagggacacagaagccgacgctccttaaaccgggtgccgaaaaaattcaaatgttgatgggcgtgaccagcgaatacaacgttatcgataaggttgaggactacgattcgggttatttcgactacaccgtcaagtgcgtgctgtacaagagtggtatgcagttaactgagggattggggtcggcaaacacaaaagagagtaagtacgtttctcgtgatggtttttcaatgaaaaacacggtactgaagatggcgaaaaagcgggcccaggttgatgccacactgaccatcgctagtttatcaaatgtcttcacacaggatgtcgaagatatgcagaactttaaccaacgtgagaataacgaaaccatgactcatgatgaagcctttaatttaaaacttaactttggcaaaaataaaggcaagagcatgggagatgtcatgaatgagaatcgtggctatattgaatggctagctgagaatgcacagaaacctgaatttaagactgctgctaaattattactagctggcaagcaacagcctgtagcagacgataaggcgaatgaagattttgatcctaccaccatcattgctagttcaaaacagacgagtgagattgctaaccttgctggtgaactggccacccaaaccaagaatggcacaccattatcagtgactaatgaggttattcaacaaattgtctctgattggaaagggactgacgatgattggaagaatctgacagaagcacaagcagaggatgctaagagtcagctacaaggattgctagcggcatttgataagaaataaacattcgaattggcttgaatgcagcagtgactgaatccaccgaatgggtgtgaggcccatgttagtgaaggaggtgtagatttggattatttcaagcaaagacgagcttacagaaatctgaaacggaaccaaatagatatctcaactggtcaaaataacctgtatcgcgagttattagactacgcgaacgatgagtatcagctagataaactgtttaccctaaagaattctgcgttgctcgatcttactggactatccgaggccgggctaaagaaggctaggaacgaactagtacaacttggattaatcaaatacgtccccggcaaaaggaataagcaaaagcctcagtaccaaattatcaggctttacagtaccagttgggctactagaaacggtgatagtagcttaactagtaacccaagtagtagcccaactggtaacccagacagtagcccaactggtagctccaaagaacttactaatactacacctgaactgactactaccgaaaaagataataaggacccacgtgaccatattcgtgaagagttccagaacgaagtgtgggctgtttacccacgccaagaaaagtttggtgacgcatggaatgcttattatcgggctaccgttactggcgccaaccccgctggtaaagccactaagagccaaatcattcagggtatcggcaattataagcggtacttggaagttaaggggatacagggacagtacgttcagcagctagcgaactggttggataacggtggttggttaagcaattacgacatgacaccacctaagccaaagggtaagtctggggccggacgtaaagagatcattccaaagtgggcgcaaaacggcgcttctcaggcggattctaagccaaactcaagcgataacgagcaggacgatatgagtgatgaggcgttcctagcgttcatgaacagtcaggaggaagctaaatgaattggggcaatcaattagtcaatttagccgctaaccatgcctatgaaccggccgcgttgcactggactaagcagcgcatgaagcggcatttaaaggccggtggtagtgcacaagatgaagtgtgcgctcatgagtacaagctatttgcactcgaggttttaattattgaatatcagcgggatggcttaaattttgatttgacccaatgttggggtaagccagccgagtattttattgatctagagcaagctagacaaggattgcaaacggaggtgagcgcatgactgaaacacaggtgctagtaattaacgctgatctacccgatatcgatcacccactagcaatcggtccagaaccggaaatgtttaagctcgcgcaacataactacaaatctggcgaatggccgtttccagttagactggttaagcctgggactaatgtacgcagtgatgaagcttacttagctagtatgttaccagatccccaagctgaggaacgtgagcaaattagagatattcgccgtgctcatcgtgatggtaaccatacgataagggcgttgaccgatgagactggctatattagtcagcgggttagctatctagtgcacaagtacagtttgccgttgcggaacggctactggcgtgctgaaaagtacgacaatcccaacgaaattattactggacaaacagttgatttgctaggtgataagatcggcgccccagctagatcgataaggcaagcaagctactcaaatggcattgtctgtggctactacattagccgggtgccgaaagtatgaacaaagtcgtgattaagggcgaactaccaagcttgaatgagtacatcaaggctgaacgggccaacagatacgccgcagctaacctaaagaagcggtacacggccttatgtagtgtatatgcgcaggctagtcgtaattctggagtagaattcagttggccttgcaagcttaaatttacgtggtacacgaagaacaaccggaaagatgcggataatatcgcgtttgctaaaaagtttgtgcttgacggctttatgaaggctggacttttaggcaacgacaatcgaaagcacatcacaggattccaggacgaatttgccgttgataaacgaaatcctagagtagaaatagatgaaattacggaggacgaataaacatgattgatatgaaaattgaccagtatcatctgactagtgacaaatacgaagttaaggttaacaggatgtcattagacagccatggtcatccggtaactagctacgatgaaaagtctggtattaatcggctagtagaagcacccttagcacactgtaaaaacgtcgaggacgcattgcactggcttcgtgggtatttaatccggactggtagtgagcacattaaaacagtggatcagttagccagaaagagtcatgaaattgaacgacagtttgacacgtacattaaagagcgcgtaccggaaggattgtgagttatgcctaaacacactaagaaacgttcaacgattaaacggaagcaccggcgcatgaagcaacatgccgaagcaaacaaaaaatcaaccaaagaggacggtaagtaattatgaaattatacgtagttgatcgtgatgatagcgggttcggcacagcagattatggaattgtgggtattttttcaacaatggaaaaagctaacgatttcattaaaaaagttgataacgtaaacagaagatactgttatgacattacaaaaacagaactagatagccctgggaaagaaatgttaaatcttagtgtgtttatgacagaataatgggagctgattagatgaaatttttggatctgtttgcaggcgttggtggtattcgcctgggcatggagcaagccggtcatgaatgtgtcggttgggttgaatgggataagttcgctcggcagagttaccaagcaattcataacgtgaaaggagtgtggaatgcaagtgacatacgaacagttagagctagtgagttacccagagcagactgctggtgctttggctttccatgccaagacatctcagtcgccggtaagcaaaaaggattcactgccggaaaacgtagttctctcttttttacagttacagggcttattagagacctcgaagaaaagaatcgacccagctacctactcattgagaacgttaaaaacctacttagtattaatcgaggatttgactttctcaaacttcaaattgaattggatgaaatcgggtacgatgtcgaatggtcagtgcttgactcagcagaagtcgtccctcagcaccgggaacgtatcttcattgtcggacatcttagaggacgacgtacccagcaagtatttcctatcgttcaagacgaccgagaagttaatcgccgggcagacgcaacaaatacccttaccacccgttacggggaagcgcagggatcaggatcgtacgttgctgaaagtgaaccgccgaaagtgaagcaggtgggcaatcttatgaataccaacattctcgctggtctgaggataagaaaattaacgccgcttgaatgctggcgcctacaaggcttcccggattgggcatttactcgagcgcgagaagctggattaagtgacagccaattatacaagcaggctggtaatagtgtgacggtgcccgttattaaagcaattgcagaaaatatggcgttcgaaacgttcggggaatgtttaaaataatttaggagatggcgacgatgattaagtttagagcgtggcaccggcaattgagcaacaggcacaaattggccaggacttcattgctgacattatggagttgagtgatcacgagagtaaacaaaaagccgcctgttaaggcgaccagtcacgggaccactcgaatgaccgttgctagtataacatataaaaagcgccgccatcactgacgccgctacgattgattcctacaaaattaattatagcatatgaaagcggaggggcacatgatgggcgaacagcaagttatttcagatgaaatttttccaccaattgaccaggagaaaacaattaaacaggtgcggcggttcctggataagaagttaccgcaagcagttcgggcgtccggccattcggtcgctgatttaaaatcgcctagcatggatggcatgcctaagtcggccccagctggtaattcggccgaggatcggattacacgccgcctgtatgcagagcagattgtccgacagactattcaagccatggctcggtgtgatcatgagtgccaggagatattagatcggctatatttgcaaggctacagcgacacgatgtgctacatggacattggctacagcaagactcaatattttgaccgctggaagccattggcaatgctacagtttgcacagagctattacctagaagacctgaatatttatcaaaaccggactcagaccgaactttttccgaactcaagccggacttcatagcaataaattggtggtaaattagtattatcgataattggttagggcgacaaataaacgtttttctgatagctctagccgttgtatgtggcggattaaggtaaatacggtatttattatgctgtatgtggttcgattccacatcgccactttagacgggcacagatgtacaggttgtgttgcctccttgattagttgatatgatcgcccgtctatcaagcagatatgatctaattggcaagatggcggtctccaaaaccgtctatgttggttcaaatccagctatctgtgtagccggcggatttataaggggtgatgcgctcctctctgccgccggtgtagtttattagtttagcagcctagatactcacgaatttctttgattgctcaaactataatccttcaaaccgctctcgctttttagcgggagtttttgtatagttaggttagttgggaggaagattatgaaaaagattgttaaacagtattggtggggattactattaggatttttagctattataattattccggttatacttcaatggatgatgatatcaatatttaataatactagtggaggatcagatgatggttggttaggtttttggggtggatatctaggtgctgtaattactgttcccacaactgtttttgtgacaatttggtcaatacttaaacagataaaagaaagtaaaagccaatttgaaagacaaatagatgaaagtaaaaatcaatttgaagaaaaacgtagaatcaataatttaagtgaattattatcaataatcatctcgtttcgagatgatacaaatattttgattgcacatttaaatgctaacaaggaattaaaaggaataaaaaaaagacgagcttatactaataataagcatagattaaatcagctctttaatgtaagatttttagaatttcaaagagatttcaacaccaagtctgtcctgcttagcccagaagatataaatagtaaagattttttacctataaaaaaagcaataacttgttgcgtaaagcactacacttcacaaaataaaatagatcctataatttatggcttagaagaagtagttacatccataaatgaacttattgaaataactcagaaaagaatataaagatatcaagcgtcgtgctaaacagcatggcgcttttcgtttggataaaaataaggaggtgcaacatgcggggaatgagacgacaacgaggtattaattatttaaagccaatcaattataaagatgttggatattatgatggaggccgagttagtaccattgttacgggcagaaacgtcaaggctttacctgaaacgtggctattggttaaggacatcttactcaagcgttagacgctgaaaatatcaattagacggaggtgtggtggtatgtaatggctaagtatgaaaaatggttaactcctgatggacttgtccgaattggtggctgggctcgtgacggtctcactgatgagcagatagcgcataacatggggattagccgctcgacgctgaacgcatggaaaaaaaggttttcggacatttcggacaccataggaaaaggcaaggatgttgtagaccggcaagttgagaatgcactattaaagcgtgctatgggaaccacgacaaccgacaagatgtatcgcatggttcataaagacgatgacgtacttgatatggaaaggcgacgttttagcaatgcttggaaattaaaacacccagaggcctctaagaaagagattgatgacgctgccattgcgggagtaaaggaatataagcgcattcagcagactgaaaatgttcatgaatttccacctgatgttaatgcagctatattttggctacgtaatcgtaaaccaaaagcataccgtgatcaaagtttccaacagcttaatgaagcacaaactgataaagcgaaagctgaggcacgtattagtagtcataaggctaatgaacttgaaggcgttggtcatgtaaatccattgcttgaagctttagctaaaggagcacaacagttagtgccaaaggaggaagaagacgatgcaaacaccactaagtagtattcaatatggtaagaaacaggcaacgtttattttttctccattcgaccatctgtttgatgtgaatgagggttcaattcgtgccggtaagacagcagctgatgatgctcgactagcactgttttatttggcaacagtggacgagaaccatttagttagcgcttataaccaggagcttgcttataatttgtttatcgaaggcgatggaatgggactagcctatatatttgatggtgctagtcatttgaggcgcgatcgtggtggcgaccatttagctttagacctaccgagtggaaaaaagaagatttacttcaaaggtggggccaagtcaaacagtgccaatgctatccgcgggatgtcattaggttcagtcgcgtactctgaaatcaacttgttaaacagcgagttccttgacgaaacctttcggcggacagccgcagctaagtatcgttatcatcttgctgaccttaacccaccagcaccacaagacccaattatcaaattctttgatgagcgtgatgcgcattggttacattggcggatgtcagataacccagtgatgacaaccaagcgtttgactgagatggagacacagctaaagaaaaatccatatctgtacaagcgcgattggttaggattaagagtcatgccacagggaattatctatgatcagtttgaccaagacagtatgactaaccataccttaattgggcagccagtagaaatgtactttactggtgatgctggtcaagatgatgccacaacaatgagttgcaatattgttacccgcgtccgtcaacctgatggacgttttaagtttgttttaaaccgcgttgccaattattatcatagtggcacggaaacgggacaaacaaaggcgatgagtacgtatgccacagaattgagaagatttattttgtggtgtgttaacacataccaattgcactactcaatggtgttagtagaccccgcttcattagcactacggcaagagctaatgaaggttggcatcgaggctggtaaggcggataacaacgggcatgatcatgttggtaactctaaaggaattgaagtcggcattcagcggcaacaatcattgattacagacggtcagtttgtcttggttgatacgccggatagtggattagcaaatcagagctatgataattatcactttgttaaagaacttggtatgtatgtgcgcgatgaaacaactggcaagccggtcgatgctaataaccatgcaatggacgagtgccgatacgctgctaattactttacgaagaaatacaagggaggttactagccttgtttaacagaatacatgattggataaaggaggtgttagtcaaaatgggattagctactgagttgcaaagtgtaactgatcataagaaggtaatggcggatgatactcagtatggattgattgctaagtggtttagtatttatcaatcaacaccggaatggttgaaaatacaaaaaaagctacccgacgattcttacttggatcgcaagaagatgtcattaaacatgggacaagttgccgccaagaagatggcaagtttagtattcaatcaaaaggctgtcattactgttagcccaaagaacgcgaagcatcctgataatccctcatcgccagaagattatcaaacggttgagaatcagttcgtacagcaagccttgaaggacaatcatttttataacaattttgaacgttacttagaatatatgttcgcaactggtggcattgtgattcgtctatataccgatcgtggtaaagttaagattcgatttgctaccgctgatgcattctatccaatcacgtcagatgctaatggtgtcagtgaagctgtcattgcctccaaattcatgagtgacagtcattactatacgttattggaatggcatgaagaaaccgatacagactatgtcgtgactaacgaggtctacaagagtacgaccaatagcaatgatgatttgggtgtgaagattgatgattggagtaacttgccagatgcgttcaaaaacatgtcaccgcagccaaccaggtattccaaaagcctatattcacgaccaacgtttatctatttaaaacctaatttagctaataacttgcacattgacagtccattgggtattcctatctatgctaacgccatagacacgttgcgccagttagatgaagcatatgatttgttattccaagaatttgtcaaaggaaaacggcgtattgtcgcaccagcaaatcaattgaaacgtgaagttgacccacaaaccggtaaaacacggtattatgttgattggagtgaagatgtctacatggcatacaacacgacaatgagtggcggtgatggtgagtcagcgaaaccgactgatattacattaggactgcgaaatgaggcaattgtggcaggcatcaatgatttgttgcatttctactcttcacaaattggtttcagcgcagatatgtttacgtttgacagcaaacagggtgttatcacagcgacagcggtaatcagtgagaatagtgatacgtatcaatccaaaaacagtcatgaaacgttgattggagaagcaattgaacatatttgccagattattgtggagctggctaaaaatgattccaatgttcaatattcaggtcaaacagatattgatatttctgttaactttgatgattcgattgctaaagaccggaatgacaatttggattattacatgaaggcgaatggtaatcaccccgttatgacacagctggaagcaattaaacgtgccaatggaattactgatgttgaggctcaacaggttcttgaccaaatcaatgtagaaatagcaaacgctgaaggttcaattgaagatgttgtcggtggtaacggtaaagatggtgaggataatgcttaaaccatgggatttatcgggatattcggatgaagatgctaacaactatgctaatgttgaagatttgatttggtctttcattatcaacctgataggaaatgaagcatctaaacatgatgataccgataatgaatggataaacgaattacttaatcatgcagatgatgttaggcaatatgctgctaaaataactgtctcgcctacacagcatgcgtctaagcaattgcacacaagacttagtacaattagtcaagataatgtcaaacaagctgaaaagtggcttaaaaaggttactggaaagcaagtggattcaatcaaggattcgcaacagtttaagcaagttgttgatgaccagttaacagagacggataattatctgaaccttgctagacgtaatatgagcgctaacgcgtatcagatgtttaggggaattgttggtgatgcaaaacgatcaattgatagtggtacaactgctatcaaagcaatagctaaagctagtgagcaatgggcagaacaaggtgtacccgcactcgttgataaggctggtcgaaaatggtcaccagatgtctatgtgcggacagtggttaactcaagtattaatagtgctacgaatgatacagagttacttaggtatcgccagtatggttcgttagttaaagttagttcacatattggatgccgtccaagccacttacagtatcaagaccatgtttattctttgaacggtaatacagacaagtatccagatttcgaatcaacaacgggatacggtacgattactggcattgggggcattaattgccgacattatacgattccatatatcgaaggctacggttcaatgccagtgccacagcagtcagatgatgacaatgctgctaggtatcaattagaacaaactcagcgacgacttgaacgtgaggtgcgaaaagctaagcgtaaactgatagcagctaaaaagtttggcgatcaaagtgatattacggctgcacaagaattagtgagccgtcgtcagtcagttactcgtcagtttgttaacaagcatgggctagtacgtcaatacaatcgagaaaaacagtagtgcccttagcatggcgttaaaaggcttattttttataccttaatttagagaggagtaataaatatggcagaagataatccagttccaacacctgaaccagtgccgactactgatccagtaccgactcctacgccaattgatactgagcaggtagccacagaagcgcgtaccgaattattaaagtcactggggttcgataacgaggatgacttgaaaggtgtcgttgaacaacataataaagatgtggcggctaatcagagtgcattggaggctaaatccggtgagttagacaaggctaccagtaagcttgcaaaagaaaccagtcgtgctgacactgcagaagctcaagtagctgctcttaaacaaggagttgatactgatcatttaagtgatgcgctggcgctcgctaaggctgacttagcaagtaaagctaatggtgtgaaaacaatcgatgaagctttaactggtgtcttagagcgtaacccagcatttaagggtgtagaagcagcacaaggaacggcagttgctggtcaaaaccttagtggtggtcaaggtaacgttgcggtgccagatttgtcaaagattagctatggtgaagctgcaaaactgaaactagagcaccctgatgtttacaagcaagctgttacaaaactaacaaataattaggaggaaataacacatggcagatgaaacaactgtattagataacctgattgatccacaagttatgactgcgatgattagtgctaaattgcctaaggcaatccggtttagtgctattgcacctgttgacactacacttgaaggtcgaccaggcactgatgtaaccgtacctcgatacaagtatatcggagatgcgacggatgtcgatgaaggtggcgctattgattatgccagcctagcaacagataccgacatgttcacgattaagaaagcaggtaaaggtgtcaagattactgacgaagccgctctatccggatacggagatccagtaggcgaaggtcagcgacaaattacgatggcaatcgcatctaagattgacaatgatatcttggctactgcaatgaaagcacggcttacgctaagtactggcgttgatgttacgtcattggatatggttgatgcaattgaagctgcatttaatgatgatacgagtgaatatgcggtagaagatgattcaccgaccaccggcgtattgtttatgaaccctaaagatgtcaataaactacgtaaggctgctgctgagaactggacgagagcaactgatttaggtgacaacatcttgattaatggcacatttggtgaattactcggatggcaaattgtgcggtcgcgtaaaatcaaagaaggctccgccttggcagttaagccgggtgcaatgcgtacctacatgaagcggaatgttctctctgaaaagggtcgcgatatggatcataagatcactaagtttaatgccgatgaacactatggtgttgcaatctatgatgacactaagttgttggtcattaatccattcgatgtcgaaggcggtactgttattaaccaaaacgtaaccagcactaaggatgctacggttaaaaagtccaataagggtaaagctgtggcatctgatacgccgtcaaaataatgtcaccgtctaatgttaaagcagtgcctacgaatgacggtgcgaggatcacagcaaagtaggcaattaaatttaggaggaatgtagaatggctaaagtgttgaatgcttatcagaagggcaatgaaacggcaattgcaactggtgatgcaaccagtgtggcaattactggtttatcagctggcacagttgttgctactggtgactatcaggttgcctatgtggacggtagtcaaacgagtgacaaggtagatgttcccggatttacggttcttgctgctaagcccgctgatccacaagatgttaaagctacagcaaccactgatggtgccaatgtaactgctggttagaggtgattggatgccgatagtagatcaagatttttacgataatgtttattttggtgagacggtaccagctgatattaagtttgaacgtttggaaatgcgggccgaagagatggtaaatcaatacgcaaattattatttcgattcgcatagtcttgatgatttgccacttgatgctgaccgaatcaacgtgaaaaaggctgtctgcgctcagattgaatggtttattgattctggtggggttgaagaactagctaacgctaaacaatctgctaaagggatcagtcatgtaacgataggcaaatttagttatgagaagtcagcgcccacaacgctgccacgtggtacggcacaacgctccaatgcggcaatcaactacttacgaccaactggcctattgtatcgtggggtgcactaaatggatggtattattgatccgattcccatcgagttgttagatgatgccattaaagtgacaccctacgacgctaataaagccaaacaggattcatggattaccagctcagatagtaatggatctgatgactacacgattagacatgtacgggtcgaacctgcaacctcagtgtcggttcaatccgttggtggtaatgctagtgcacaggttgtcactggggcttacacattaattattgattcagctaattcagcgccactagataggttgcccaagcttaacgacaaagttgaagtacaaagtactcaccaatcattaatcgtgaagagtcttgatcctatttatgatttcagcacgcatgttcatcattgggaaggggtgctgcaatgactaacaaagtagacttgtcaccattagttacacgtttgaataatcttaatgtgctgacaaaccgactagcagatgtgattgtgcgtgattctgaccaatatgtgccatttctaaatggttatttagctggccatgtatctagaattcaaaccggtactggcgttactattgtttggacagagccgtatgcggcctatatgtacggtggtaaagtaatggtgaaggcaccggatacaatgggtcagcggagaggctatcacaaagtagtgacgaatcggcctttgaattataaccacactaagcatgcgttagcgcaaaagggttgggttgataaagcctatttggttaatggtcacaattgggcagcgctcgtggcacacggattgggggcgacgtagtgagtcaagttgaccttgatctggatgttcgggttgctaattatattagtgctaacgttaagctgtttgatacgttaacacttggcaatgactatgctcctggaatgtcactgagttatacattgcaacccgctggaccggcaacgcgatattatgacggtcgccgccgtcgtagttttgcatttgcaatcactgctaaacatccacacggaattgtttgtattaacactctcagtgccattatggacatcatggagaatgcaacgccgatatcaatcaaaagtgagaacggaagtttcaaattcataagcgctaagatgacaacctcaccggagtttctagccactgttcaggatgacgatggtcaagatgctcaaaagtatggtgtctatcaaggcgcttttagtgtacaagtaattatttaatttaggaggaatgcaaaatggctgatgcaacaacaccaacagctgacccgaacgacagaaacgtccaggggtcaattcaagaaaactatttagatgaatattgggtaggaaaaactgcggcagataagacgatcaactggttatatttaggtgatgggattacgactgtaacgcctaaatatactgataagaagaagtctgctgcctactacaatggtggtggccaagaacgacaaacagttactggggtaacgtcatcgtatgatatttctggtgatcgttcaattgggaacccggcccaagatgatattgccgacatgaaacaaaaaactggtggcttacgtgaacggatgttccgtaaagtccaatgggtacaagaagaagatggttcattaacacctaatgcaatcgaatcaggtatgggaacattctctgacattgatgatggtggtggcgctgcggatgataacggtagtttcaaggtaacgatgacgtacaacgctactcccgcagtaatcaaggcaagcgacccagctgctatgacagaagcattgaaagatacaccttgtcagaatgcaattattcttggtgttaaagccaatatgccaactgacaacggtaatccgtcaaaataacagcgccatcaaatgttcaatcattgcctactagcgatggcgctattgtaaagagtatgtaggcaagtgacggagcgatccgtcatacatagcattaaaaatattaggaggtaccagcatgagtgatgtaattaaattagaggttcctagtgacagcatgacttttgaaattggtgataagagttacacggtgagctttgcggataaatcatttgctgtttttacagatcaatataacgacattaagatggccgaagttaagttgcaacaagacttgcaacaccgctccgttgagttaactgataaagaagctcaattggaaaaagatatgattaatgaaccaatgacggcgttagatcataagaaacaagtcctacaacgacgctatttgcgaatgtacgatgatattcagaacaaatataagattgaagctaaggaacgcttttatcaattacttgatggcatgtttggtaaggatgctggcaaggaactatatcatacttgcaatgattctatggtggtatttgctaaggttgtcgctaaaatcatgattaacgtagaacaacatacggatatttccgattatcgcgacaagtacttacagtccattacagaattgcggaagaatgaacaatgagttttaccgagataaacactaacagtatcgtatttcggaaacatcggtatcgtttagacctttcatttcgcatggtgttgctctattttaaagcgattcgggatgaaggcctaactataccagagcgtgtagaagtcagcttaaaagcgctggtattagacgatacgagcaagctacgttttgaggataagggccagttactatctgaaatatttaatacaaaaatcaataatgaccgcgatcgggttcgagctaaggtgctcaagtctggtaagcggtcttttgattttgatgaagacgaatcgttaatcaaggctgggttccaacaacagtacggtatcgatttagaccgagatagcctcagttgggaacggtttaccactatgttggatggtcttaatgaagatacgcaatttaaaaaagttatcaggtttcgactgaccaaggttagcgatgatatggatgctgatacgcaaacttatttgaaacaaatgaagctaatttatggtttaaagcaagctcacaccgatggcgacggcaagctgacaccagatgaactatctatcgagctggctaatttagatatgccacacaaagcgttacggatgaaagagctacgggagcagggcaagatttagaaaggatgtgtgtagatggctgatattgctggtagtgtcaagattaacgtggacttaatcgctaaagaggcgcttgcacaagccgaagttcttaagcgaacatttaaagacgtggatgttagcccgaaagcagctgccaatttaaaagtgttgaatcaagggttagagacaactgcagccagctatagtaagctatcagccgctcaagaacaagcagggctgcacatgtcttctcaagtttctaagttgaactcttataaagcacagttgcaagctaaccgacaagagatgacagcaacagctggtgaaattggtcgtctgtcacgagcagaaggtgataattctgctgaagtagtagcggctaaaagcaaatatgctgcccttgaacgtgaacagcaagctctggttttgtcagcaggcaagttgcaaaagagtgttggtgcgttaacacctgaaatggctgccgtagccgataaagctatggcaatgggtactaagatacaaaatgccggtgaaaagattagttcattgggaagtaaagccaccatcggtttcacggtacctattgtcacagcactgggtgtagtaactaaagccgcttccgattatcaatatcaattagctgatatccgtaaggaagttgttgcacaaggatactctgctagccaaacaagctcaattatgaagaatctatcttcagacacattaaagtggtccaaagagtttggtgttggtaccaaagaaatcaatgatggtatgtttgaattggtttctaatggttacaatgtcaaacaagccatgggaatgatgccagagttgttaaagactatgacagctaactccgatcagtctggggagtctattaaactgactgcttctatgcttgagcagtttggtcagaacttgggttcaaacagtactgtaatcaagaatggtaatagcttgatgaatcagatgactgaagccacccataagtcagccatgtcattagacgatttgaaagaaattagtggtaatgctggtgctgcaatgcacgccatgggcgttaaaacatatgaatttatggcaattgcagggcgcttaaagtctgctggtattgacgctagctctgttggtacggggctgtcatcattgatgacacgagttggaacagggacaggtcaagcagctaaggatttaaagaaatataatattcaagtattcgatagcaaaggcaaaatgaaagacgtctttgatattcttggacaaatgcagggtgcttaccagaagatgaatgataagcagcgccagtcatttatgtataacgttgttggtcaagaaaatatgaaggtcggtatgaccttgatggacgctaatcttgaccgatacaaatcgttatctaacgagatcgaacacagcaatggaaccgttgataaatacaacaaaacaatgcgtaacactagtcagtttactatggcccaatttaaatctagtttaaacgctttagagattgaatttgggcagaagttcctaccaaccctcacgcccattattcgtgagttaaagaatatgctagaccgttttagcgacttagatccagcaacacagaagctaattcttaatacaggcttagcagttgcggctggcggtccattgattagcatgtttggaaaattgacctctggtgtagggctactaactagtggatctatgaaactattggttggtgctgctaaactatcaccgttatttggcactttggttaaagatggcagtgcggccagtaccgttattgctagccttagtggtggtgcagaggcaggttcagcctccttgttaggtttaggtggttcagcattaggcacagtttcaggattaggcgcgttggctgcggcggccgctccagtagttcttggtgtagcagccgtggggacagcgacttactttgcgattaaagctggcaaggagcatagtgaccagttgaagcgtcaacgtgcttcgatggacgaatatggtgccaatattagtcaaaactcgcaaaaagcgattggatcgtttaatgaactacatcaaaaagccaagaatgatatggcactgttggacaccgcggtaggcaagcagtctaagcagttatctagtgatgtggtttctaaatacagtaagatggctgacatggttgagcagcagttttccaaaactaaaaaggctgggttggatgcgttatctgacttatctggtagctttggcagtgctggcaatagctggatagtgcaagtgcaaaagggtgttgacaaacgcgcagatgggcagactagtaagttggagaaagccaagaagacgatggcgagcattctcaaatctgttgatggtgatttctctaagctatccgctactcagaaagccaagttgaatgaggcagaagcttacattgactctcaaatctctgcgtttggcatggcctacaaagaccagcaagcattatataaagcctacgttcaacaacacggaactattacggatggcatgtataaggcagacgtaaagtcagcagattcggcatattccaagacttatggcaaagcaagtggtagttataagaagagcttatctgaattgaaatcgttgagaaagaatgaccaaattagtaaggaccaatacgaccaagcacttgccatgctagatgctaaacgtaacaagcaacaaactcaggcttcgttggaatacattaaaactgaaaaggcagccggcgatgcgtataacaacaatggtcgtgaaagcttacgcacaaagcaaacgcttgatgatgcgtatactaaaacgattaccgatgagaatggcaaaaaggaaaagctctattgggacgatgtcagcaacagcgaagaatcggcagccaagtggattgcggaccataagaaggataaccagaagtatattgatgatcaagtcaacgcgcatgggaccattgaaaagaatatagctaagttccagaaatctcaagaaaaagcctatgaagcaatgggaatgtctgactctactgctgttgcacaagcaaaggttgatgctgataacatgttggcagaaacgaccaaatcaggtgctaaattagctgctaatgcagaaaaaactcatgataattatgtcaaggctttgaataaaggaactctaggtaacccagctaatgttgctaagcaatggggacttgatctttctgacagtgctgcaaacatctcgcttggaaagtacggttataaaactgcacaacaattttgggaggacatcaagtcgggcaacaaacaaggatatgaagaggcgaaagtttatttcaattcaattctaacgggatttaaagatgatgggaaaaagaacattagtgatcttactggttctgagaaagaggaactccgatctggtctctcaacgggaatcttatctttgaaagatttagctcctgtttttggtaatacaattaccggacttttcccgcatgacttgtctaagctgagtagaaaagaaattgatactctgaaacaagggttaaccgatggtgccgtgaccatttctgatttgaaacaacagtttggagacaatattaccggtctgtttcctaaggatctatcaaaactcggaaaaactgatatagcaaccttaaaagaaggactcaagagtggcgatattactgatgctcaattgaaaagccagtatggcaaacaatatgctactatctttaagcaagatttatctaaattaggcaagagcaatattcaaacactcaaattaggcttggatttaggtatcattaccaagagtggtttaaagacacgttatggtaaagcaatttctaatatctttgatcataacttgaaaaagattggtcaaaaagatattgataccttagcaaatggtattgatttaggaattccaggtgctaaatctgcattgaataagttaaagtcggcagtaaagactggcgccaagattaatattagtggcgaaggtagttggactatggatactctcaacaaggcttatgctgataagaaaatttcaactgaaaactacttgaaagtattagcagcaatggttaaagggaagactaatattgatattggtgcaagtggtcgtgcaaccatggatagttataacgatggtatcaacggtgaaaaaaaggtgcctattaattcagttacagggactgctcaaaccatcaaagatgttatgacattggggcaaaaagctattggtgctggtaacgatacaatggaatcatttaatcaaggcctagttgagaaagctgccgatcctcttaagtctgctggtggggttggaaaaggtgtggctcataacttagatcaaggtggcgccagtgttaacgcattgtcaaaagcagtcggtggcaagagttcttacacggcaactgaaaacaagttaagcataacgacaggaataccacataaaaccggtactaatggtaaaatcacaagtcctgaaaccgcgatagtcggtgatggttataagccagaattgattgattacggtaatggatcattaggactgtcaccagctgttcctactgtgactcacttgcctgtcggtgctcaagtcttttcaggtgaggatactgaaaaagcggcaccagtccttaaaatgatggggttaccgatgtttgcgactggttctggtggcaacattgttgattggatcaagagcctatttggtgatgccatgaagttcatggagcacccgattaagaactggggaaaactaatagattctagtttcaacatgaacttatttccgggtggctcacagaaccaatttggcccagataccaaagcttgggaaaagaaacaaactagctggttgaaaaaactagaggacagtctaggcgatattggtggtggcggtgcaacgtataatccaagtatgattaagcgtgcagcacttgctatgaagacaagcatagacggtgaaaaactaaagcagttacaatatttgattaagaacgaatcaggtggcaatgctcacattcgaggaattgatgacggagacggtacaggcccagctatggggctactacaatacaagcgatctacttttgatacctatgcactacccggtcaccacaatatcttatctgcatgggatcaattattagcgttttttaacgatagcaattggagttcagatattggtgtaggttataacggcaaatatggtgagtggcgtggacaagcttctgggcccagtggtcatcgccgctttgataagggcggtgagtcctatgagaagcagttagcctgggtatctgagcataatcaacgcgaaattcatattccagatgatcagtcgaattacagcaagtatttaacggaccaagctgtcaagatgtcatttggtcagcaggcttttgttgctacaagtgcggaacaggccgctggattaaagagtaccattcccgtagatgttcctaagaacggtgggcccgtcgcagtcagtggtgcaacggcaaacggaactggtgaggtattaggtatggttaagtcattagtggacgcaattactagtaagacagttaacatcactgcaaaactagataatggcgttctttttaatgcccaatatccattaattaagctggctctaggccaagatgttgtcattgatcgagcgagaggaggcaaatagatggagttagatattcaagtgattcaacaggatggcagtaattactggctatctgatttgggtattcaagtagaaaagttttcaccacctgcaccaacgttcactcgaacttacacgccagttggtaagtacaatgtagcttcatctgaaacacacacgagtgaacgcaagataccactagtgtttgatgtcaaaacaattgactcagttgaccaagaactaatgcggttgaagctgtttgatttatttcgcggctacgaggatttttatgttgttagtagcgtcattccatcgattcgttggccagtccatgcggatgatggttttaatgtagacccttatgaagcgtcacctattatgacggaggatatcacagttaacctagttgttactggtggatttggtgagacgattaacaccactgccaacatgaagaataacataccattaggatttgatattccgtttgcatgtttaccaccgtatcgtttcaccaatcaaagcgatgtcaaggtgtttgttggtggctcaattccgttgctggctgatggcaagacggccacattaaccttccatggagatgtggctagtcaattatcgattactaacaaaactacgggacaagtgtttcagttaaatcaagcgttgaagaaatcccagactctaattttatatggcatggttccagttgtagatggcgtgaatgtctacagcaagggtaatcatgcctatttagattacgtcaaaggcattaatgaattactggtggcgggtgcaacgaattatgatttggaatttgatacacgctattacgtttaggaggtgctaaagtgttttatttacgtgatgtaacgggtaatgagttaccaattaccccaatttcagcacaattgactcaaactgtgaatcaggtggcgcagttggaattgacgttcattaacgagggtacgaatgcgtctgctgtgggcatgttgcaaccacgcacgctcttgctggattctgatagtggcgaagcttaccgtattcagaccatgaatggatctaacatcggtggtagtcgtaatgttaaagcaacgtttctgggctctgtgcacgatttaaacgaccattacgttgaaaagagtataaaaggatctcagtcgctcgatagctgcatgcagctaattactgaaggcactggttttacttatacaattcatgatgatttcaatcattatgatttttctgaagattttggtactggcttagcgtttgatttattcttaaacactttgatgtcagacttcaatttcgaatggactagcacgggcaagcacattgatatttataaacaagttggtaagcgtgatgctttcgtttggttagatggattgaatcttagctcgttgacagatgagagtgattacacgacgattgcaactcatattaaagggacaggtaagttagacgacaaggaaaagccattggctactgctgagtacacgagtcctaacgcaacaacgtggggtgtaattgatgcagagccaatttctgatgagcggttcacgaatagtgattccctactggcatatttgaaatcgaaattacaagatgtgccgctaattcagcgaaccgcgacattgaatgatttcatgactaactcggtacctggaatgattaataacagtgaggttggaaattacggctatattcgagatcgtaatggcgtggatgttgaaactcgaatcagtgaaaccgtgattgatttggttaacccagcgacgactagcgtgacatttggcaatatgaccaaaagctttacacaaatcaccgcgggattgcagactgcacataatgactctggcaaacagattgagcaattaaaagccggacttgatgctgtagatggaaatgatttaataactgacacgagtacactagcaagacttaatgcgttgggtggtgctgcgaatggataaaatgacggtgcaacaggctattaatattctttcaatgcagtttccaattagttgggagaagattgccaataaaccagagttagttactagtgatgacttggacaaacgactaagtttattcggacagttgacctcaccagatggtactgcatgggagcctactatcgataatgatggaaaagtgacgtggaaaaagaaggaggcagctgaatgagtattaaattattcactaatgaattgtctgccgtatacgatgaaccgttacggaaaatgctgataactaactttgaaacaattcgagacgctttcgatgtggttcttggtaatcaggctacactaaattcggatcaggataagattaatcaggatctaaaaaatatcaaagatgacaacaaaactagagatgctaatgttcaagctatcgtcaatattctgaataagtatgatgtaccgattcaaattgttaatggaaaagtagtagagattacagaggaaggtgattagatggcaattagtacaattacgttggatacgtacaagcaacaaattggttccggcgatgcgtttaatttgagtgatagcttcaacggccgagtgggagatgaacaggttccactggccgtccattttaaagagcgggggctagcacaacagtttcaagatggactagtgccatttttgactggctttgttggtagtcttgatgagaataaccaagtgacggctgagaccggtgaagcagttagctatgttgggactagcgatgatattgttggcttaggtcgagtgaagatgaaccttcccggaaccatgttcccccaggaaggctttttttatgggttcttgggtttacaaaatgctgatggcaaacgcgttacgacctttaatgtctggttccatgtctacaatggcaacccggacatgtttgtgaataaggcaccgtttagaactgagttacagaaattcttagatgaattgcaaggccgcattgatgatgccgatggcacgttaaacgactggaaacagaaagtttcagatttgttcaccaagctgagcaaccaaggcgttgacacgcaaacactgctaacgacacttgaacagcaaattaaacaagatgggctattaactcaaggagcacttgataaagcgctgaatcaatttgaagatcattttgcatcgttacaaagtaaggtggatgcgtcggttactagtgcgacgacttttgcgaatatgcgccggcttggtcagaagtaccgtgtacaaggatcggtagcctcaaacgggcaaggcttcaccggattaggtaatacgacagtggtccaatactttcagaacagttacccacttgatctgcggtatgggacgttagttaaatttaacgtcgaaactggtactgagattttgtccaatgaaattatgggctatcatggcaattcgatgacttataatgcggcggacgggtatatttactttgcaatggctgaagatgctaccaatactgacgaagctcataaaaccaaagtcttgcagattaacccagcaaccttaacggttaaaaatacgattgatctaactagcaaaacagccctaccgcttatccattctattgggtacgataatttagacaattgctttattgtggcagataacaagacaatggagttctatgattcatcatggaacttgcaatttacgattaaatggtctgatttgattggttatgatccttggtatatgcaaggcgtgcaagtccatggaacggacctttactggattggtggccgcaagtctcaaatttgggcttataccattgattatgcgaataaaacgctagtttatcggacaacctatacttttgacgattttcaggaaggcttatatcctaccggtgaaatagaaggcatggcttttaacgataacggtaaaatttatttatcttcaggcattaatgttggcacgtggggtggattaagccaattctacgaaacaaatcacaattttaaaattccggtatctggttcgatgttggtttcaattcagaacgctgacccagatacgattgatttttgtgttggtaataattcagcctataatcctgacggtaccgcatctaacccgtttgctagtttattggaagccagtgtttgtctacgaacaccatcaacaccatttaagcaattgacacttttaaatgatattcctgatgaaacgttagcgttggttaatgtcaataatatcatggtaaagacgcaaggcttttcggttaaagcagccgtaattctaagctgcaataatatttattttgatcaacttaaagctggtgggtattcgaaatataaaatgaatgcactatatgtttttaattcaaatattcgattaaacggttggcaatgtgcggatttatcaactaacactgatgttactgaagatgttcacattgaacgtagccaagtttacttgcaggataattcgaagtctcgaattgggctgtataacagcacaatggattcagctgggagcacctatcatttagttaaacagaacgttatgtctaaattattgtcaaatcaagtgttaggtacgatttcagatgttaaaaatgctagtcaattagtgactaatgatttttcttattacgctaatatgaatgccaccgtgtcagttaatatcgctgggacttcgttcgcctttaatctatcggctcccatcacacctggaactgttaatttgattggttatgcagaagtacaaggaaccatttatatgtgcgctttccactacgcttatacggttccagcgaactcaacacttgaaatttactcgttgccagcatttaccaaggtaacgcctgtaagctattcaattacagccacagtttctgataaataaggagggatagcatgaagcttactttaaatgaagataaccatattattggtgttaatcaggatgatagcacctatgattatgacggatatgtgcctgatgatttaacgacccacgctgcggacggcttttatatggttatgtacaacacaatcatgccaacaccagttattagtgatggaacagcaatgacaacaccatcgccagtaatgcaagctatcaacgcattaggcttaaaggttgcagcactggaacaaaagattggagatggcaaggatgcttgattttgtcaaaatgatgtttgatgctggctgtcagattgatggctacgtgggttatggcgcaattacggctgctgactacaaaagtatcaccggtaaggactacgtagcgtcatctgccgcactatgattaaaggaggctattcgatggctaaaacgttagagtttacaactaaatcacctcggcaaataaagcaaggcgacaccgagacgacgtttaccttcatttgcaaaaacgccgggtcagctatcgacttaacacaggctactagcattaccgccaagattggcaatgacagcggttatttaagaagtcagtctatcgcgattactagtttggccggcctaaaaccgggctggcttaatttacagcctatgccgactttgattgcaggtctgccggctgggaattatcagttagaaatttgggtgattgaccaggcaggtacaagtatttatcctagtgataaaccactgggatttaccattacaaacaacattgagaacgagtctggtgcgagtataaccacgattgcttttgatgattttgtggaagcaatgaataaagccgcaaatacaatcgacaagggtgacaaaggcgatgatggtctgtctgcctaccaagtcgcagtaattaatggctataaaggttcacaaacggactggcttgcttctttgaagggtgacacaggtactgttgataatgctggtttgaccacagcaccagcttttgttgcgctccaaacgcaagttgataatagcgcggttgggactaacttactggtagggactgcgactcctgcatctatcacgggtaataatgttactaatcaagttgcatatacttatgccctagttgggggcatgaaagcttatgacttgtatcaaaaatacggtagtacatttaccctaagctatgattggtctgttaaagatacagctaactcttatacagggcagatgcaacaacagtttcttggttccccttggggttttagtgatattactaatatttcaagtagtaacacatcaggtcataaggttactgtttttaatctatcaaacagctctgccaatatagctacttcccttgaatttcacctagaatatttgccaaaaacgtcaacaattacagtgtctaatatgaagctcgaaaaaggtagtgtagctactgattggtgtcctaatccaacagaaattttgacacaagcagattacgcaaaaataaaagcggctattgtagcgctaggggggactttgtcatgagttttgatttaagcgaatttttaacagacgggttaattagcagcattaacaatggactgattccatcggacttagcaactgtatacgctggcaattatctagtaaaatcactgattacccaagctcaggttactcaagtatccgatgcaattacagcctacaaagctgcacaggcagcagctaccgcagataataacagcgtacaataggagagtggaaaattgaataagcacaatttaaaggcactcatcttaacggtgggcgccatttttatggcctttttaatggtcaatgttaccagtcaggctgctcgcatggacatggtcgatgtgtcgaataacaacggctacatgagcaccgctgagtacacatccatgcgtaatgagttcggtgttaaggcccttaccgtcaaagttagtgagggaacaaccttcaaagacggctatgctgctagcaatattgctaatggtcaagcagctggcttatacgtcaacggctatcattttgcccattataagactaaggctcaagcaattgccgaagctgactttgctggtcaggcagccaaagcggccggactaccggtgggcgcagtattggcaacggacgtagaatcggctgaggaacaagggatcttgtcacaagcaaccaatgaccgcaacaatgccgccttcatgaaagagattcagaagtttggttaccgaaccgatatttacacgtcaggatcatgggccaacaataagatgactgtcaaaggtaaaactggctggattgcctcttacccgtatgtggttagcggtaagaactggtattcaactaaccacgcatggcagtggtcatcaacggctaagttccgtattagctatggtggcttcgatgttagccaattaaatagcaactactacactgctggccagaaatcaacggtcaagccgactaataaaggtgcagttaagactaacaaccaaaaagcaaacaaaaatgtttccaagccggctgcctcggcaaagtgggtcaaggaaaagaaaacctacacactcaagactgcggttaagctgcacacaagcacgtcaacgtcatcaaatacgatcgctattttgccagctggaactacggtaaagactgatcaagccattattaagggcgggtaccgctgggtacgtcagccacgttttaatggctatggctatctagcaaccggcccggcaagtaatacgctggaatatgtaaagagtggtgcaactcatacgtactacacagttaagtatggtgacagctggtggacaatcgcacaacgcaacggcctgagcatgactacactagctagtcagaatggaaagtcaatttacaccactatctatcctagccagcgattggtggtgcgataattgcatacactattaggattaggttgggatgaatggggatcgattgttgccattgtcactagtatttgtatattagctaattggattctcaacaagacggtccgtatcccgcttaacgatttaggcaagcggcttagccgttttactgatgaaagtttaaaagtacgacagcaaaacgccgacacaatgaatgctattgaaaaccgggtcattaaggtagaaggtcggttagatggtcatgatattgaacttaaacacctatatgaaaaggaagtcaaatcaaatgaaaaaaattagttttaagaatgctgacggaagcttgaatggaaaattaattgctgggattatttcgttgctaatcgttttgatccaacaaatctttgccatgttcggcattaagtttactggtgactggacaagtattgtggccgttgttaataccgtattaacgattctcgggatgctgggcgttattactgacgttcaaacggtgacggcaccaacgactgataacgatgaggaaagccaggttgaagcaatggctaacaaagttgctgatgaagcacaaacaccaacgtccacagtcgctgcagtgaatagttctgcagcttctgacgctgaaacgacgtcagaatccgcctcataaacaggcgaaaagtagtataattaaatattgaatttgctaatcccctgcgtttcgacgtaggggattttttgctttaaatatcgcgatctaatcctatgagtataaagtctcgaagaacatttaaataatcaaagctcaaaaaagtattgattaacattaaagtaatgtctacaattattattgtaatataaaaatcacgtttcagtagtttgatatatttatgtgtttttagatataatacgttttttaaaattacttggtttaaaatatgacatttttcattaggatgtttaaggaagtgatacgtattaataactttttttggcctcataatcccttcaacgaaaatcaacgagaatatttatttgtagaattgtttagaaatgtactttctaaagatgaatattttaaacaggcttttatatccatcataaaacatctttatgaatgtgattatgatgtggatacgggaatatttagagaaatggcagataaaaatcatgattatatagaaatatacgtaaaagatcaacttggactattaagaacgtcaaaaattgtaaaaaggatccatagccagaaagaacagccttgttatgaaattcgtattaatagaaataacgaaaaacctagggtttttttctcaacctttataaagcctaatggattaagtgattgttttggagtttggaaaggacttttactttgttatggaattagtaagaatggtaatatggaagttgatacaaatatcttaactgatgagttgtgccaagaaactcatgatttagcaagtgaggttgaaaataattgtttttgtcaagaaacaataaataagtatcaaatcactaactttcctgactgaaaaatctggaggccttggatatgaatgaaaagtataaaagtttaaaaaatctcattttaaaaatgtttcccgacgatacaatggtaaaagaacaaattgagtctaagtattttgatttgtctcaagatattataaggttagaatcaaaaaataaaatgggccaacgagagactgctgattttttaaagatgtcattaacggatttcttggactttgaatcaggatattcacatgatgatgaaaaatataaagagataaaagataaattgaaattgcgtttaagcaatagctatcaagtgttaaataatttaaatacacacggatttgattatttagaccctaacactgatggtgaaacttatatagtggagacaacgaaaaacttaataaataacaatacgaacaagtctggacagcaaaataatgtaattccgtttatattggatggaaaaattgtaaaaaaatcggtagataaggttgaatatactgacactttaaccaatagggaaattagttatgtttagaatggagggttttcgttaatgagcaatgaaaaattccaattaaaactaatggaaatgagggtcccttttttatatgcttcgagtctgaaaaattttgagtttaaaaatattgaagatgcgataaaaccagtaaaatttgaaaagaatagaacaattgtaactatatccatgaatttggaagaaacatcgaaatcattaagagttactatcaatgcctgcttttcgttaaataatgtagttgttgctgctatagttacaactaggactactaaagccaattcacagtcgtttacaaaacaagatgttgagcaacatcgaaaagatttaattagccctgcggtaggaaaaatgaatcagttaatttcggtagccacggaacagcttactggatttccatattctgctaatattcctactgattcgaagtataaatagtgatggctaatttcctgcgtttcggcgtaggaaatttttttgcgtaaaaaaaaccgtctacatggggttgcagacggccaatacataagaaaaagtatcttagcgaaagaggaaaccagatattagtaggttccactggtatcatatgaatatatgagaaatcgtgcaactttaatactcagtactgcgaaactacattactggcaggtgtattctaaagccagtgcttctcacacgtactacacggttaaatcaggtgactgatgatgggtgatcgctcaacgaaacggcttgagcgaatatacgttggctgctcaaaatggtaaaacaatctattcaatgatttatccgggcacaaaattgattatcaaatagacgaaattctcacactggcaattgctggtgtgaggattttttgtttgttgtgaaattaacgctttcattgtataactgttgtaacgatgaaagaatgctgatataacagcaaaaattgatttttaactacaaaagttgtaattttagataaaataagaaaatcccacactagccctaattggctggtgtgggactcttttgataatttagtaacaaccataaaaattgtaacattttgatacgtaacccatgtaaaactagcaattgttatcatcttttgtcaaaacttataggttcttatgcttaggatcttttgatcaattagctcatatatctattacaaagtaatacccaaaaaagaatattgtctgggataatattctttttttcaggattaaaagcaaagttcaaaagttcctctataccccaaaaacttttttgaacttttgaattctttaagcatagcctcataattccaccaacagataaattatcgattcttcccgaagttgtcactaaccaaacttcgtttctatcatcttttaataaagaggtatagtcctttgattttaagtctattgctccattctttacttgtatgtaaatatttttagaatccctgtatttaccattcaaattttttgaagcatttaataaaacaaattcatatttctgtgtgctaagtttatttgtggaaggaattacaatataattaaacttatcaaataaccatagtgcaactaaatcttctgtatcagaatatctaattaaactaaacaaatcatggcgattaaaattaattttctttatgcctttagggcttaaaactcctgccttcaccgcagaaaataatcctgtagcggtatactgtatatcattaattttatataaattttctctgacgtcaattcgtcctatggatgaataaaaattataaacagaaactgaacctggtacatcggcctcagctcctactttaatccaatgtatgttgtttaattgagcagaacaatcaaaagccgtagcatctgagcctgcatcaaaataaaatagattctcaggactatctggtacttcggcaacatagtactgtcctgcttttctagtccatataaagtctcctttttttaaattgtcaaaaagaaaatgaaccccttgccggttccacttaggggcacttttgtattcaccattttgatcatgccaaaactttttgaaatctgacagactttgtatgtgttcccttccatcagcatatggaaatgaatatccacaagatacgcaatcattttttatgaaatattcataagaattgacatcatgattaggcccacccttacccttggctctccatgtacttactctatccatcataagttcctcctaagaattgaaatattagtttaactattcattgccaaaagctgctagccagccttccaatacagataactgttttttattcaaaaaactatttttgccatcatttttagatgtgtttagcacttttgcaatataactatttaagtatttagcatcattggtccatatttttcccctatctacataatcaggtgtatccaaaaaatctaaatttttaagtacatttttacatctaccctctatcccaatattagaataaattactgtaacagcaaaaaaggaaagtacatcagcctggactgattgttttctgaatctattataaattttattacaaaattttatgtcatttatataaatgtctgaattatcttcagagtaacttaatttttccaataaattcaacacggtgtcacacgcaccaaatattacaggatcaactgcttctaaaatccaacgaccttctacgatttttttatccatctctaatcctcctaaataataaacatatattaattaagctgttctttgcttatgattaatcgttttacacagcctactaagtcttctattttaaaagattttatgattaaacatactttcaattataacgtatatggctgatagatagtctgaatagagatgttagaaaattcccaaatgggttgaaaatgggtagccgggtgggaatccaaagattatcagttaaatcaaataagcccattttcatcaatctatacaaataaagcttgaagttttgatgaattccggtacagttctggtacattaattgctaaaccactgtcatagaagtaagtaatgttgttacccttaagtaattatttacttaacggaacgtcatcagaccacaccctactatggggtgtggtctttttttatctctggatgtggttttggtgcgaatcatcacgtgcatgaccacgcatataacgattactgagaatttatacttaggctaattgttagtgcaacttgatatcaaccgccgtatgattacggtgacttggcgttagaggcgtaaccgtattggattaagcaagtcaaaacaagcccaacagaacgtcgcatagtacgtctgttgggcttgttttaaaatttcacttgggttgaacttctggtcgacagggcactatcacttttgtggctgctgcgtgataggctgaatacgatgatcaatgatcgttagtgactgacctgactagtgccatcagtatagttcaaggtcataccgggctggatattgaaaatatagacattaaaactgacagcattgctatcaactgactgaccacgcatttgaacaccgcgggctaacagttcgttacctttgaaaatgggggtcacttgatagcggacgtagtttttcggactttctttcaaataggccgcaacttggttttcataggtcgtcatttcagggtcattcaaagaacgggttccggtcatgaggttcttgatattgttgttctgccccgttaattgatagccaatcagatgactgcggttgtaaagccaaccgctactgatgcgtttgttatgccaacccgttggtcgaacattcagggcctcacgttcagctttgggcatcagtgactgatttaagagggcattagcagccgtcacccggttaagtgagtctaaattgccatattgttgccaggcaccctgactcgtactgagctccttagcggtaaatgcgggctgattctgattaatcgtgatcgtttgttgaccgttgtaagttttactcgccaacgtagtgttacttgggttatggtcagaattgaccttggttggtgctgttgtcgaagttgcaccagcttgcttgttcgtagccttgagtttgtcaatatgttgttgactactcgaaagttttttcacagcctgctttaagctgctagcagaagcacgattggcagcctgaagtgccgtcaattgcttgtcattattagccgttactaagtgtgtcttagtaacggtctttgtcttcacagttggctgagtggattcatcagatgtgccgagaatactaaagctgacgagcaatgcgataatggccggccaactatgccgccaccattgacgcccacggtagcgccgatgtaagcgccagaaccagtacagggttgcaaataataagatggtgccgatcaatgccatgaagtgatcctcctatcgaaatgacttacggaaaccagcggcccgcgctgcgtcttccgtactaaagtaaacggcatttttaccggccatccggtagttttgccctgtttcaacgtgataaattttggaattgcggttacccacgatacgtccggtttgggcggtatcggtatcgccagaaaaattattctgccgactcgtggttgcggtactagtttgagtttgttgactttgagcagctgcttgactgctggccttggccgcttgcttagattggctagcggctgcgacggccgaagcggactgggcttctgactgggagcgtgattgtgcggccgcttcactagcagctgatttggcggcagcctgtgacgctgattttgatgaggccattgcgtcgtcatgttttgcttttagttgttcggattgacgcttagcctgactagttgcaattgcgagttgggtcgtgtttgaactaagagctttggctgaggccgcgttagcccgactagcggcctttgcttttgcccaggcggctttattagcagcagtccgtttctcaacccgaaccgtcttggttttgacactggtatggttggcggcttgttgattaccagtggtacagccggttaagatgagtagactcgttagtgcaacgacgagtttttttgcatggtgcataagaaattcctccttgtttatgtatcactttaattatacataaacggtaaaggttggtaaagcaagtttggtaactaaaaatcaattaatattggtttatgctggtattaatttcgataattaatcataattagtgctaactactaacacccattcggaacaatttagtaacaggtatttaaaatgttcatagcttaatacggcgacaaatcagacctgtgggggttattaacgacctataacggttgtataaacaggctaagattgcgataatagaacaaacacaccaatgggggaatttttttgaaggcaacgttacagaaaatcgggacggcactcaataaacgcatggggatcatcaaagcattatttgtattctctgtcctgttatttgtgattacggaagtcggcaaaattgcgaaggaagtcagtggcgcgcagttggcgaatgcgcttgcttcgcaaagctggtggcatctgttaagcatggtcgtgattggtattatcgcagtgacaccaatgctgacgtatgacgtcatgattacaaagtttttacccaaccactattcacttggctatatcttaaaagctggatggatcaccaatacatttacgaatatcggtggttttgggggcgtgctgggcgcctcactgcgtgctaacttttataatcgcgaagccactaagaaacaaatcgtgtttgccatttccaagatcgctttgtttttagtttcgggattgtcattatattgtatgatttcactcgtgctagtctatggctttggcattgggaacatgtatggcagttactggatctggctcgtcggtggtgcactgtattttccagccatctttatttttacacgagtcaacgattcggaattcttcgatggccttacgctcggcaacgtcgttcggttattgagtgggtcgtttggtgaatggactggctgtgtgctgttcttcttattaattggaaactttatgggattacccattgattttgcagcggtcgtgccgttattcgtgattgcttcggttgtcggtgaagtgtcaatggtacccggtggtattgggtcattcgacgttttcatgatttttggcctcggtgcggtcggagtttctcgaccagacgcagtcgcatggctcttattttaccggttattctactatattatcccgtttgccatcgggttggtcttattcatccatgacaccggccatcgcttaaacgtgcgcttagcgggtattcctaagcaggcattacaacgtgttgctcagatggtactgacggtttttctctacttttctggttttttgatgttgttgatgtcaacggtccctaactttgcatataacaataaactcttcttacagttttatccgtacacctttttctttattaatcaggccagcagtattattatggctttcttactgattggggtggcgttgggaactgctggccgggtcaaaaaagctttttggccaacggtgattgtcctgctgattgcaattttgaatacgattcgctggctcgtcgtttatgatgcaatttcgatgaaatttgtgattttcttgattgtgattctagcgctagtggctttgtcgcggcatgcttattatcgtgatcggttggctttttcgtgggggcaaacgttgtgggttagctgcgtgtatgtggtgacctttatcttgtatacgattgtgggggtctataacgcgccccaaattcatcatcggcatgcggttcctgaagctctgttcttcccatcacaaaagctctggttatttggggtgattgggttagtcttagcggcaatgattttgattattatgtaccgctactttgcgagtggctataacgcccgattgcgtcaaaagatggatgcggctcgggtcaaacaagtgattgaaacttatggcggcaatgaaatctcacacttggcttatttgaatgataagttagcatattactatcaagtcgatggggtcgatcaactgatcttcttataccagcagaaggctgataaactgatcattatgggagagccattcggtaatcaaacggtattacaagctgccttggaacagttattggatgacgcagatagtgacggttgctcgctagtcttttacgaaattagtgagatgctgacgatgcgcctacacgaaatgggctttgactttatcaaaaccggtgaagaagggcacgttaaattggcagactttagtttggctggtaaacggctacggggtgagcgggccctaatgaataagtttacccgggatcactatgagtttgccatcttgcagccaccgttcagtgccgacgttatggctgaattacgagctgtttcggatagttggttagcaggtgagacggaaaaaggattctcgctcggattttttgatgagcagtatctcaatcaggcacccgtagcggtcgtttatgatcctgaccaccgaattgtcgcgtttgcgaatattatgccgcagggaaatcatcagacgacttcaattgacttaatgcggtcaagcaaatcggcgccatccggcattatggacacggtctttgtgcacctatttgaacaggcgcgtgacgatggctatgcttatttcaatatgggaatggcaccattatccggtgtaggggtttcacgctacagttttattcaagaaaaaattgctcatttaatttacgaatatggctaccagttatatggttttcagggattacggtcgtacaaagagaagtatgtgactgagtgggaaccgaagtacattgcgtaccgaaaacgtaattcactaatcttcaccattttacaattgctacaagtcgttaatacccgggtacacaagtctgagcggcaccggccagtatggttgttgaaacgattgaaataactgaatagtatgtcataaagtaagtatcgttaatgacatagcaaaatgccccatcactgcgagaagcaatgatggggcattttatgatgactttagaattcagccgactaatatgatgagggctgaactaattgtggcagaagcactagagctgttttgcgtaggctaaattatttagttcgtatacttaggcggtaacacatgtttgaaatcatggaaaccagcgaaaatttcatcaagatcatgcccattaatgaataggtcgaggttagcctcgggggcaaaccctaagtcggcggtcttttgtagcatggcgactagatcgtcgtagaagccgtcgatgttgtagagcgcaatcggcttttggtgaatatccatttgactccaagataacatttgtaagaattcttcaaaggtgccaaacccgccaggtaaaacgataaaggcgtcagcgaggtgaagcatcttttccttgcgttcggtcatcgtgcgcgtttcgataaaagtcgtgacgtccttaaatgcaagttctcttgcgaccagaaaatgcgggatgatcccgataacgcggccaccagcatccatagttgctttggcgactttccccattaaaccatggtcgccaccgccatagacgagttggtaatcattagcggccaagtattgaccgagtgccaccgttttctcactaaatgcgggatctaaaccagaattagacccacaaaaaacacagatattatgaattgccattctaaactacccccaagataaaattttctagcaaaaatgcggcccggataggcgccgcatttttgtgaactaacgtgttgattaatcgtctggattaccaatatcgtagtcggtgtcttgcattgcttcaacttgacccaagcggtaaccattcccaacttgtgagaagaagtcatggttagaagtccccgttgaaatcccgttcatgacgaccgggttaacgtcttccgcagtatctgggaagagggcatcttggccgagattcatcaaggctttgttggcgttataacgactaaaagtcaagacttcatcagaccaaccaatttgatcgtaaactaaatgaatgtagttttcttcattctcatagagtttgtataagaaatcgaacatccagtctttaaattctgcctgctgcttttcagaacggtctttgaagcctaattggaacttataaccaatgtaagtgccatggacactttcgtcccgcaaaatcaatttaatgatttcggcaacgtttggcaattgattgtggcccaagtagtacagtggcgtatagaaaccagaatagaacaagaaagtttccaaaaagacgttcgcaactttttgtttcaatggatcttcgtcgatgttatcgtaaagcttgtagatccattgggcttttgcttgcaagaattcttcactgtcactccagtcaaaaatttcattaatttcgtccggcgtatttaatgtttcaaaaattgttgaataactctttgcatgaacagattccatgaattggatgttatttagtacggccgtttcatgtgaagttaagacgttgcggcgaagtgcttgcagaccgtcttgtgattgtaacgtatccagcagcgtcaaaccgccgaaaacgtgtcccacgacccaccggtgatcatcatctaattcacgccagtctgccatgtcgttggaaactggaatccgggtgtctaaccaaaattgttcggttaacttttcccaagtacttttatcaattgcatctgaaactcgatcccagttaattgccttatagttgccattactgagcagtttttggtagtaagccaagtctgttgccatttgttatcctcctagagatctaagatactaaattacgcagctttcacattcgttaacaccgacttcgccatcgtcatccgtaaaggtccgaatataataaatcgatttgatccctttgcggtaggcgtagttccgtaaaatgtttaagtcccgcgtggtcatcttatcagtgcgaccatctttccattcgtataagccagctggaatagttgaccgcatgaagagggtcaagctcattccttggtcaacgtgttgttgagcagccgcatagacatcgataactttacgcatatcagtatcgtatgctgacttataatagttaattgtatcattagataggtaaggagcgggataataaatcttaccaattttcttttcttgtcgttcttcgacccggttgatgattgggtgtaggctggcagtcgtatcgttgatgtacgagattgacccatttggggcgacagccatccggttttgatgatagaggccatcacgcataacggcttctttgagggcttcccaatcagctttggttggaatgaagataccgtcaaacagtgcagtggtcttgtcatattttggttgccaatcttgggtggtgtacttgtcaaagtaagaaccatcggcatacttggatttttcaaagttaacgaaggtttcgtgacgttcacgcgcaatttcgttagaagcttttaaggtccagtagtttaagagtaagaagtagatattggtaaagtcaacggcttctttactgccgtattccatctgattcttcgcgaaaaaggcatggagccccatggcacctaacccaatggtatgggcttgacggttccctttttggatggaaggaacgacgtcgacgttagagtggtcagtaacaaaagttaacgcgcgcaccatggcttcaacagaatgtccaaagtctggagaggtcattaagttaacaatgttagtcgaaccaaggttacaactaatatcagttcccaatttctcatactgttgttggtcatcaattaatgatggggtttgcacttgcatcacttctgagcacaagttactcatcacaattttaccgtcgataggattttcgcggttcgcggtatcaatgttgacgacgtatgggtagccagattcttgttgtaacttgctgatttcattttcaaggtcacgcgccttgatcttagttttacggatgttcgggttcttaaccatattgtcgtattctttggtgatatcgacatatgagaacggtaccccgtattcgcgttcaacgccgtaaggactgaagagatacatatcagcgtcagccttgatcaactcgtaaaacttgtcgggtacggtgacaccgagtgaaagcgtcttgagccgaatcttttcgtcggcgttttccttcttagcagaaagaaaggcaataatatctggatgaaagacactaaggtaaacgaccccggcaccttgacgttgacctaattggttagagtaggagaaactgtcttctaataatttcatgacgggtacgaccccactagcagcgccatcgatatgcttgattggatcaccggcaccccgtaagttgctgaggttaataccgaccccgccaccgatccgagaaagttgtaacgcggagttaatcgtccggccgattgagttcatatcatcggtcgattgaatcaagaagcaagaaatcaattcaccacgccgggcccggccagcattgagaaaactgggggtggctggttgataacgttggtgaacgatttcgtcggccaggtccatcgccaagtcttcattaccatcagcaaagtagagggcgttcattgccacacggtcaataaagttttccaagtaatagtcgccatcatccgtctttaaggcgtattgggcataaaatttgtaagccgccataaacgtcttgaagtggaagtcttgcgaccgcaagtaatcgtaaagtttttcgataaagctaaaatcatacttatcaatggcaggggtttccaaatagtcgtgttcacgtaggtagtcaaagcgcgccttaagactatcaaatttcatcgtgttcggttcaacattttgttcaaggaaagcggcaagtgcctcctgatccttgttgagcggaatctgattgttaacgggaatattgatctcattatttaagtcgtaatacgtgacgtcttttaaatcttttaaggtcataaggaatcctctttctatcagtataattgtggctggcaaaatcgacgacccacaatcagtaggttgatgattgtgggtcgtttatcatattttaaagggtaaaccagctatgtaaccacgcaaaaaagcgtgaacaaactaaacagctaattgttttaaagcatcaggacggaagccggcaatgctgtcttcgccattgatttcaacgaccggaacagcatggaaaccttgattcttcaggtaatcgacgtattcaggattcgtattgatgttcttctcttcaaaggcaatattgtgcgccgtgaggaacttcttagtcatcttgcattgcatgcagttgtttttagtaaatacagtaacttttttcatttttcatcatcctaactcgtttttctgataaatttagtatacaacatgtggtgaaaaaaacaatcaaaaaacacaacatctagggtgtggtaaaaatcacaagccctagatgttgtgctagtgtcagcttttaaccgactaaaaagttttttaaattatttgtggttcactcgctgaatcagttatcatagatatagaccagaaatttagaggaaaataaatatgaccaactattattatacacacaatccggatattgtgcatgatgaaaagcaatggaattttgaaatttttaatcactcgtttaaatttacgacggacaacggtgtcttctccaagcgtaccgtggattacggctcacgaacactacttgcagcgtttgatcaaactgatttgccagcgggcccaatgctagatttgggaaccggatatggtcccattgggatggcgctcgcgtatcaatcacccgaacgaacggttgatatggtcgatgtgaacgagttagcgctaagcttagcgcgtaaaaatgttgctttgaaccaaattacgaataccaatatttttacgtctgatgtctatcaacaagtgaccgcgactaattacgcggcgattgtcaccaacccaccggtgcgcgcaggtaaggaagtggtggatgcgatgttaacgggggccgtttcacggctagtcgttggtggaacactcaccgtcgttttacagaaaaagcagggcgcaccatctgcgaagaaattgatgcaaacgacctttggtaattgtcaggtgattaagaaggacaaagggtattacatcctacaaagtgtaaaggagggatagtcgtgacggaaccaacagcggaagactggatgcaagaagcattacatgaagcgcggatggcctacttaattggcgaagtgccgattggggccgtgatcgttcaccagggtgaaattattggccgtggtcacaatttacgggagcatggtcaggatgcaacgatgcacgcggaaattattgcgattcaggaagcttgcgaatatttgcatagttggcgattagccgattgtcagctatatgtcaccttggaaccatgtttgatgtgtagtggggctattattaatgcacggctacctggactctactttggtgcccgtgatcccaaggctggcgccgttcgtagtttgtatcaggtgatggatgatacccggttaaatcatcaagtaacggttcatgaacgcatcttggcacgtccggccggcgagatgttggaaaacttcttccgtgggattcgtaaacggaaaaaggcggctaaaaaagcacgacgtgaagctgctgaaaaaaattaggccgatggctggtaattgtggcgcaaatcatgtattatagtatttgccgcaaggccaaaaggcaagggtggatttacgaatcgtgtcaggtccggaaggaagcagcactaagtttgcttcatcttgtgccttttgtttttatgaaatgtaacagctcttagccattcggttgagagctttttatttaaattaaatattgagtgctagttttgaacgtgctgataggttggtttatttttatttacctattatttatagtagtaatacgttatttgggtgatgcttttcaggctgatagttaaagccactgtttgttgaaggaataaccaaacgcctaataaaggtggttaaaggcctgggcatcgactcgttggcaagtgcgcttagatgcttaatttgcataactgacactgatcgttagtggaagcagcacaaccaggaagctaactgttcaggacgtttaaacaatggcttataataagtaatgataaccaaagtatgactgatgtaagaaaggaagaatcgcatgtatcgggcactatatcgggtttggcgtccccaacgctttgatgagattgtcgggcaacagatgattacccagacactaaaaaatgccattatgacccaccagacgagtcatgcgtatctgtttaccggtccccggggaactgggaaaacgtcggcagcaaagatttttgccaaggcaattaactgtcaccatcttgttgatggggaaccttgcaatgaatgtgagacttgtacggcgattaccaaggggcaactaaatgatgtcatcgaaattgatgcggcttctaataatggcgtggaagagattcgtgatattcgggacaaagcgaagtatgctccaacgcaagcggactataaagtctacattattgatgaagttcatatgttatcgactggcgcgtttaatgcgttgctcaaaacgctagaagaacccccggctaacgttatatttatcttagcgacaacggagccccataagattccattaacgattatttcacggacgcaacggtttgattttcggcggattacagctaaggatagctacgatcggatggtgtacatcctcaatgagaaggatgtgacctatgatgaaaaagcgctacgcgtcattgcagcggctgctgaaggtggaatgcgggatgctttaagtattctggatcaagtaatttcgtttggggataacacggttacgttggatgatgcgttaatggtgacgggaagtgtgaccaagcagttgctggctaactatgtcagtgaggtcaccgaccatgatacgaagccggcactagagacgatgcgacaaatcttacaagaaggtaaagatgcgaaccgtttcattgaagatttgatcagttatacgcgtgacgtgttactctatcaacaggcccctgaaatggtcgatagtgtggcaatgggcgaggatgatcaacaatttgaagcatttgccaagcaaatcgatgctgaagtcctgtatcaaatggtcaagacgttgaacgatattcaacaacaaatgcggttcacgacgcaccccgacgtttatttagaagtgttgacggtcaagttagctcagttggatggtcaagcggccgttcaaccggtagctgcggcaacggtcaatcctgaagatcccactgtgcataaactggcacaacaagttgaacagttgcaaagcgaggtcaaaacgttacgttctcaaggtggtagtgtcactaaacccgcaccggctaagccgcggtcgagtaatggcccggttgttaagaaggttaatgtcagtcagatttatcctattctgggagcggcaacgaagaatgatctcattaaggtgcgcgatgtttggactgatttgatgaacattttgagtgtgacgcagcgggccctaatgcacgtggcccaaccagttgcggccagttcagaaggtgttgtggttgcgtttgactatgcgtttgtttatcaaaaagcgattgatgaccagaccttgatcgatgcactcggaaatggtttggatcggctgatgggacaggcacccaagattgtctgtgtgcctaaagaacagtggccacaaattcgtaaggattatttggccactcaccagccaggaggtgcaacatcagagcaacaagcaccggccaaagaaccggtcgttgaagaagctaagaacatgttcggtgatttagttgaagtacagccggactaaagacgaaaggaactgataattatgatgcgtggaatgggcaatatgcaaagtatgatgaaacaaatgaagaagatgcaggcgcaaatgacagccgaacaagcggctttaaatgaacaaaccttcacgggtgcggcgccagacgacatggtcaaagtcacttttactggtgataagaagatgaaggatattacgattaaccctgatgctgttgatcctgatgatgtggatatgttacaggacttagtcgttgctgcggtgaacgacgcgttgactaaggtcgatgaacagacacaaagtacgatgggaaaatatactaagggattacagtaaaaacgaggtaagtacatgcagtatccagaaccaattgctaagttgattgatagttatatgaagttgcccggcattggtggcaagactgcgacgcggctggcgttttatacaattgatatgaacggtgatgacgtcaccgagttcgctaagtcgctaattgcggccaaacgggacctgcatttttgtagtatttgcggtaatatcaccgaagatgatccgtgtgtgatttgtaaggataagtcgcgtgatcaaagcaccgttctggttgttgaagaggccaaggatgtcatggcaatggaaaagattaaggaatacaacgggctgtatcacgtcttacatggggtattgtcacccattgatggcaaaggtccggaagatatcaacattgccagtttattgaaacggctacagcaaaatgaagccatcaaggaagtcattattgccaccaacgctacgcctgaaggtgaagcaacagcgatgtacatctcgcggttagttaagccggcgggaatcaaagtgacccgattggcgcacggcttgtcggttggtagtgatattcaatatgcggatgaaatgaccttattcaaagccgttgaaggtcgccaagaaatgtaattggaggtgccaccatgtttaaacgtaaacagaagatcaagcatcccaaggaagtttttgatgaacagttgttgtcgaccctgaatgccgctaagttggactgggaccgtgcgaagcagaaccaagaagcggtctatgataataatacgagtgaactagttacgcagaccgccttagcgcgtgctaagtatttatatctgtatcgtgaagcacgtttacgtcaagttcatgggcagacgattcagcgctcggtcattgataaatagactgttagtgatttaagagataacttgtttcaaaataaagacgcacgtcgttgatttttgtaaatctacggcgtgcgtttttgatttagaaccctagcattattttaccagttaatctgtcatgcattgtgattaagacatgctaggtgcggcaattggaatagaagatgtgtatctactaatgaataacaaactaaaatcggtatttatcaatcgtgggtagtactacctaataactttttagcaattcaccgaataaatcatcaaaaccacaattggtagtagccgacccacgtaaaaatcgtgaaaaagtaccctcactagtggtaaccgtattagacaggtactcaaaaatcaagtacaattgctacatataagaaaatagatgggattgggaatgttgacaggaaaattagttacttttgaagggccagacggtgccggcaaaacgtcagctttaaacgcgattgtggccaaattacagccacaattaggggatcgcttagttgtgacgcgtgaaccgggcgggaatcaaatctcagaagcaattcgaaaaatcattttagaccgtcataatacggcgatggacgaccgtacggaagcgttactctatgcggcagcacggcgacaacatatcgtccaaaccattcaaccagcattgcagaacgaccaacttgtcttgtgtgatcgctacatcgatagctcggtcgcttatcagggggccggtcgtggtattggggaacaagcggtttatgatatgaatcagttcgcgaccgcggggttaaccgcagatttaacgttgtattttgacgtagatgctgccgttggattaaaccgcattcaacaacatcgccaaaatgaaattaatcgcttggacgtggaagccttaagttttcatcaccgggtgcaagcagcgtatttgagattactggctgatcatcctgaccgtatcaagcgcgtcgatgcaagtcagccattggaccaagttgtgacgcaggccttagagattatggcgtcacagttaccgacttatgtggcatccaagggaggggaagaccaatgaaattaattattgcaatcgttcaagataaggacagtaaccggttgagcagccagttcattgaagccaatgttcgggccacgaagctctcaacgacggggggcttcctacgttcaggtaataccacttttatgatcggtattgatgatgaccgtgtggatgaagttttagccatgattaaagaaacgagtcatgcgcgggaacagtttatgacaccaccagtcaatctagacgtgacgatggatggcgcagctgcctatccagttgaagttcaagtcggtggcgccacggtctttgttctaccaattgaacaatttcaccaattttaatgaaggatgattattaatggcaacaaccgagtcatttgcgcaaacgttagcggcgaaacagccccgcttattagcggcatttaaacacatcatcgcccagaaccatctggcccacgcgtacttattcgcggggatggaaggcgctggacaaccagaactggcccattggattgcgcaacggttgttctgcctgcatattaatgatggtgaaccagatggcacttgtgaggagtgcgtccggattgctaatgggtcgcaccctgatattgtgacagtggctcccgagggtcagcgaattcacgttgatcaggttcgttacttaaaagctgaattctctaagagtgcggtcgaaggtaaccggaaactgttcatcattaatgatgcggagaagatgacagcgagtgctgccaatagcttattgaagtttattgaggagccaagtggtaacgtcacggccttgttattaacgactaataagcaactgatgctaccaacgattatttcacgaacccaggtgatcgaattcccaccattaaatgcgcaggcgttacagcagacgtttgaacaggccgggattgcgccaaaccaagcacagatgttacggggcctgacaaatagcgtgacccaggcgcaggcgttgctagcggatgattggttaccacaagctgcgcaagcattgtggcggtggtttgaccaggctgttaagggtgacccacggagttttgtggctgtgcaggtcaatttagttggtttggctaaggacgctgatcatcagctggttatgttggatttaattgcggccttgttccaagatctattgcaattacattttgaggtggcaacgacagcgttaacctttggtcagtaccaaaaagaattggccgggttaacggctgaagtcagcgatgagcagttgattgcggcgacagaactagctttaacggccaagcgccagctagctagcaatattagttttcaaaatgtcttagaaggcttaacgttaaagttatggccgatttttcaaacaaacgcttaaataaaggaaaacgagggtgagcgcgtggataagcgtgatttatacgatagtttcggtgaaatggaacaacagatgcaacaaatgctagacaaaatggctaagttacgcgccgatatgacaacggtgttagagaaaaacgcggaattggtcattgaaaatgaacatttacgtgaacacatggtcgaaattgaaaatgaattgccgaaaaaagcggctagcacgaccacgctctcaaagtcacggcaaaacttggaaaaactctatgatgagggcttccacgtctgcaaccagttttacggcaaacggcgtgacgatgacgaatcctgcgttttttgtttggaagtcatttatggtgaacgtgaacgcgcatagtcgaaaaagtctgggagtagtcccagactttttgtgcttttcaccacgagtcactcataggaacaagtcacggtcgagaggattgttaggaggacgttttggaaacacaacaaagttttgcagatcatgcgggtatcgggaccttgtacttagtaccgacgccaattggcaacttacaggatatgacttatcgggcagtggcgatgcttaaaacggttgacctaattgccgcagaagatacccggaatacccaaaagttattgaatcattttgaaattacaacgaaacaaattagctttcatgaacataacacccaagaacggattccccagttaattgaaaaattacagacgggcgttaacttagcacaagttagcgatgcggggatgccgtcaatcagtgatcccggcaaagaacttgtggcagcctgcattgccgcgaatattccagtcgtgccgctaccaggtgccaatgccggcctgactgcgctgattgcttctggcctagtgccacagccattttatttctacggctttttaccgcgtaagaagaatgaacaaaaagctgatttggctaaattggctcggcgacatgaaacagtggtcttgtacgaatcgccattccgtgttgccaagaccttgaccctcctagcgaccgtctgtgaagggacgcggccaattgtggcgtgccgggaattgactaagcgttacgaggaattcgcgcgtggaaccttggctgaaatggtgacgtgggcgcaggatcatcagttaaagggcgaatttgtccttttgatcggtggtaatccggataaggatgaaccagaaacaacggatgaattggcacagttgccagtcaaagcccaagtcgaagcgttgattgcagccggagataagcccaacgtggccattaagacgattgcgaagcgacgaaatattccccggcaaagcgtttataatcaatttcatgaactaaataccaacgatgaggagtcttgatgaatggcaactttaggcgcaaatgcgagtctttacagtgaacagcaccggattacgtattatgaatgtgaccgcactggtcgcgcaaccttaacgacattaattgatattgctgtactggcatcagaggatcaaagcgacgcccttggtttaacgacggaaatggtgcaaagccatggtgtcggttgggtcgtcacgcaatatgccatcgatattacacggatgccccgccaagacgaagtcgttacgattgccgttcggggtagtgcttataatccatattttgcttaccgtgaattttggattcgggacgcagatggtcaacagttggcctatattacgagtatctgggtcatgatgagtcaaacgacccggcgaatcgtaaaaattttaccagaactggtcgcgccgtatcagtcggaagtcgtcaagcgtattccgcgcttgccacgaccgattagttttgaagcgaccgatacaacgattacgaagccgtaccatgtccgcttctttgacattgatcccaaccggcatgttaataatgcacactattttgattggctcgtagatacgctacccgcgacgttcttgcttcaacatgatttagttcacgttgacgttcgctatgaaaatgaagtcaagtacgggcaaacggtgactgctcatgcgaacatcttaccgagcgaagtggccgatcaggtcacgacgagtcatttgatcgaagttgatgatgagaagtgttgtgaggtcacgattcaatggcggactttaccagagccgattcagtaatttgctgggttggtatttacactagtgtgttaatgatgtggtcatgagcgacttggtcgattagaacgcacgtttttattagagtcgctagcgattcagtatgctatgattaatacatccatacaggggaggttcattatgtcaattttagttttagggggagctggctacattggttctcacatggttgatcggttagtagaacacggtacggacgtcgtggtcgttgataatttggtcacgggacaccgtgctgctgttaattcggcggccaagttttatcagggtgatttgcgggatgcggattttttgaatcacgtttttgatactgaggatattgaagctgtcgtgcattttgccgccttttcaatcgtaccagaatcaatgagtaagccactgaagtactttgataacaatactggtgggatgatcacgttacttgaaacgatgcaggcccataatgtgaagcaaatcgtcttctcatcaacggccgctacttatgggacacctaagcagattccaattaaagaaactgatccacagttaccaatcaacccgtatggcgccagcaagttaatgatggaacagattatgcactgggcggacgtcgcctatggcattaagtttgtcgcgttacgttactttaacgttgcgggtgccaagccagatggcagtattggcgaagatcatggccccgaaacacatctggttccaatcattttacaagttgcgcaaggaaaacgcgatgaacttaaaatcttcggcgatgactataatacgccggatgggacgaatgtgcgtgactatgtgcatgttgtcgacttagctgatgcacatatcttggctttgaagtacttggctgcaggaaatgacagcaatgcctttaacctgggttcttcaactggtttctctaacaaacaaatgttagcggctgctcgtgaagttaccgggcaaccaattccagctaagctagcaccacggcggcctggtgatccagactcattggttgcggcgagtgataaggcgcgtgacgtgctaggttggcaaccaaattatgacaatgttaacgatattattgaaacagcgtgggcttggacgcagaagcatcccaatggctacgatgatcgtgactagtatcggttagctgataattgaaagcggctttgaaatctcgtcaatagatttcaaagccgcttttgtggtcgtcaaaaaaggtgcatgtcaggattgagtccttggcacgcaccttttagattgatcaatgcagttagcggtgaagttgttgataatcaccgataattgttaagagtcgttgaatatcagttgtatcaacatcaccgatggtaccaattctgaagctagggatatttgaaaccttcccaggataaatgacgaagccgcgttgcttgatgaactgatagaagtcagcaaaatcaaagtcgacgttcgggtatttgaatgacgtaatgatgggcccttgaatggctggatcaatcactaattcaaaacctagcgcttgtaagccgtcgctaaggagttgttgactagcacggtaacgttggtagcgtggtgtcacgccgccttctgcttgcaattcaatgagtgcttgcgcaaaggcatgtaccacgtgggttggcgaagtgaagcgccattttcctggttgcttggtcatggcttgccattggtcgtagagatctagacaaagtgaacgagcgttgtcagcagtgtgggccaaggtcgcttgttttgcaatgatgaacgcaaaaccgggcacgccttgcacacacttgttggcactactaatcaagtagtcacaatccaattcatcaatgctaatcgggacgccacctaaactggacatggcatcgatgatcgttacgatcccgtgttcatgcatgataggcattaaggcttcgattgggttgagaatcccagttgtcgtttcgctatgaacggttgcgaagtgggtaatctccggatggtcagctaaggttgcttcaatccgaaccggatcgacggcttcatcttcgttgaacacaacgtcgatatgtggaatatcgtaatattctgcgatttgactgattcgatgcccatatgcgccgttaatggcaatcatcaaagttgcatcggtccgtggtactgctgtgccaatggtggcctcaacaccaaaactgccgcttccttgtagtaggacggtcgtatagttttctggattggcttgggccatagctaagatttgttgccgaatggtttcggtgacgtgccgatagtcactatcccaagtacaataatcaatttgcattgcgtccttaacactggcagtcgtactgagtggaccgggtgttaggagtaaataaggttgtttcataaaaatcgggctccttgtctgctaatgatcagtggcaaccggttgattgatttgatcaagcaatgccggtaattcagccatcgattgtaaaatgtaatcggcaccagcgcgttgataagcggcagtgacgtgggctcgtcgttcagcttgttcggcggggctaagggcgttgaaggctaactcagaaagtcccatgatgttgctaccatcaataatccctacagagactgcgtcggcgttgttgccttctaagatatcattaacggaatccccaattttcatgacggttgttggatcggtgattgtgagctgttcagctgctaacgcaagcattgccggcgctggtcgaccaacaccaccagtttgttctgaagtgatgttgacggcgggacgatagccttgcttagctgcaatcggtaagaccagagctaacatttcagcgtcatagccggtggtcgtgccatagctgatattgtgagcggtcaaatagtcaattacagctgacatgccgggctttaattgtccgaattcagtcagggagctaagcaagattgccttgaagttgctaaagatttgattgcagtcgtcttcagtcggtaagacttggaaacgcgcctgccagtcgttttgaacggccggtaaatccatgattttatggatatgggtgtacttatctagtcccatatcttggcgaatctcagcttcagagatttgaataccaacgttggcaaaggctttttggaaagccacgatgggcgcccggctgccatagtcaatggtcgtgccggcccagtcaaaaattactgctttaattgtcattgatgaaaactcctttgaatttacttagttgttctttaagtagtggccacgtaaccgcatagaaaccagttcgagcacgattgcgacacccaagagtaggtagacaatcaaaccaacttcatggaaatcgaagtagaaactgccagccatgaagaggtagtaaccgatatcgtcagcaccggctgcagcaccaacggcgaccgcattggcaaagttaatttcaaaccggatgaacgtccagctaagaagtgctggaatgattgacgggagaatggcctgaaaaacaatcggccaaaaacccacgccactcgcctttaacgcttcaatcgtatcttgtgaggtttcttcaatactttcagaataagccttaaccaagtacgctacactgtggaaggtcaagccgaccacggcggcactagcacctaatcccatgactacggagtaaattaacacccataaaatcgttggaatggcacgaataaaggccatgactgctttaatactagtagctaaccaactgggtgctaagttacgggcagcaccgacggcaatgaagaaggcgattagcgctcctaacaaagtcgtcaacattgctaatgaaacactagtcattagggcccgtaagagttgccccagtgtgtcttgaccaacgctagggtgtaagaacatagcattcaggttgagacctaagctatgcaaagcgtcaatgatgttcaggttggcattattgagtgtgactaatgaatagacactgataagcgttaggccaatcataacggctcgcaggattttgcggggccgagtcaccaacgaaatcgaccgggttggtggtgctgacggttgaagtacttgtgttttgggttgactgttttcaatcatgcaattgccctccgaattcgattagatgtcaattctaaaacaatgactaaaatcgcaattaacaaaacaattagaccagcagcgtcatagcggaacgccttaaaatagtagtcaaagagaaaaccaacacccgtacccgtcaagagtccgaccaaggttgcgtcccgtaagttgttttcaatcatgtagagaatccaactagtcaaggtactagcggcttcgggtaacaccccacagaagacacattggaaatagttggcgccaacggcttgcagtgcttgaagcttttcggcatcgaggtcctcaatagtttcagtaaaggcccgtgttagatagcctagcgtcataaagaacagtgccaagaagcccgtaaagtcactctgtttaaaagaaaacagaagaatcatcgcccaagcgaccaccggaatattacgtaagagtgaagcaccaaaacgaataatccagcggaggacaggcgttggggtggtcgtcttagcaccgagaatcgcaaagatcagggcgaagagactagcgaccatggttgatgaaattgccacgagcaaggtccgccacagctgataaagaatcggtcccagataagaaatcgaacgacttgtcggaataaagttggtaaacaaccacattaagcccgctggaatcttactgatcgaagcccacgcctgaaaattaacgagggccatggataagacgtagatgccaattaaaatgagcaaaacaactgataatcgcaaccgacgttgccgaaaaaagcgttgcggtgtcattggattagttttcattggcagccaccgccgttgattggtcaggttggcgataaatgtgctgtaagaccgcgtcgtcaacttcattagtggcgccttcgaaaacgatggccccgctgttaatgccgacgatatggtcggtgtacgccattgcgatatcgacctgatgtagattaatgaggataatcagttgtttttcctttgccaatcgccgtagaatgtccatgacaatggtcgttgatttgggatctagggaagcaatcggttcatcacataaaatcatcttaggatgttgcattaatgcccgtgcgatcccgacccgttgttgttggccaccacttaattgatcgcaacgttggtaggcgtattcttttaaccctacttcgtcgagtagttgtagcgcctcttgtttttcggcgctactgtaaaggccgagcatgccagcaactgttgatttagcgcctaagcggccatgcagaacattttcaagggccgttaacggactgatcagattgtagttttggaaaatcatgccgatatgatgacgaactttgcgtaattcagctttgttcgcttgacgaatgtcagtgtcatcgagcaaaatttgaccactatcatcgcggatcaactgattgatactccgtaaaatagttgttttaccagcaccagacgggccgatgatggcagttacttcgcccggtttagctgtgaagttgactgctttgagcgaatgcttattggaaccatatgttttatctagctgaataaccttgagcattggcaaatcctttcattgtgaactaatggtacgtggtttagtaacctactaacttatgcgttggcgcgtaccacttgtcggtaacattaactaatttggacttttctgatttcttagggaacatcattggtgtcttcgcatttggttcagagaagatctttttgttttgggcaaaggacttcgacgtgaactcagtggcgatcttcttttgatcatccttgctgagggccttggtattgtatacccatgggccttgttgaacaggcatcatggcaatgttaacgaccgacttgccggctaaacttgtaaatggcgcttcggcgttatccttaacagtgaaagttgagccgaccttgtcccatgatcccttggtaacgtttaagtatggcattaaatcagcatcatcaaaggcagcgacatccgcatcccccttgagtaagttgaccgcggaaccctgatgagagccaccatagagcactttactaaagaatgatccgctttgagttaatttatcttggtcagcggttttgatgttgaattcacgtgagatttcagccgttggtactaagaagcctgaagttgaactattggaaacataagacatcttcttgcctttgacgttcttaatactgtacttaccgttttcttcatactttttggcatctttttgttgtaccattaagtaggagttataagtagcgtctttcaaggtacctttagcatcagattgtgcggcaaaaggtacaacatctttgctcttgtggtgtgcttggatataaccgttagcccccatgtatgcgacttgagctttgccggatgcaattgcttggatcgcaacgttatagtcggtcgtggtttgtaatttaaccgtcttacccgttgccttttcaactgcttgcttaatggccgtacgggaaccagcaaaactcttggctgattcgttaggatagaagaccaccgtgatggttttgctgctatccgtactgctaccaccagatttagcactggttccgctagcgcaacctgcgagtcctaaacctaaaaccgaaatgaatgaaagacctaataatgacttactaacttttgacatagtttccaattacctccaagtaattttagttacttgtgtagcataacaaggtattgtaaatgtgcggacaaggattagtgaagtatatgtataagttatgtaaataatatttacattcggttttcaattcagcgattggtaagtatgagtggaaactggtcaggatagttgttgattgtttctggattgaattggttggttactaccgtaaagctttcaaagtaagtaaattatgataagatatgtgaagtaattcaaaatgaggagttttttaaaattatgaagttgttggcgattgatacttcgaatcggccattgagtgtcgcggtattagaagatacccagatcttggccacaacgaccactaatgttggccgtaaccacagtagtacattattaccaattattgaacaagccatggctcaagctaaattggcaccagctgatttagaccggatcgtcgttgctgccggaccagggtcgtatacggggttgcgaattggcgtgacgactgctaaaacacttgcctttacattagataaagccttagttggtgtatcgagtttggccgtgttagctggcaacattgtgacggaaggccaattagtggcgccgttatttgatgcgcgtcgtgacaacatctttgccgggttatatcggattaagaaccagcgtccagttgccgttatcgctgatcaacatatcagtgtgaccgagtggggccaacgattagctagttatgatgaaccaattacctttgtcggcgcggatgtcgatcaatatgcggatgctttgcagcaatcgttagccaagcagttcgttcgtgcagccccacaacttgacttgccccaagccgtagtactaggtttgatgggtcgaacgctgacacccgtgagtgaaattcataactttgtgccgaactatttgcgtttaacgcaagctgaacgtgattggcaagccaagcacccagaaaaggaacatgcgccctatgttgagaaaatttaaggagtactttcaaaaaatgaccaccggtggcaatcaacgccgccaacgtgtattggccattcaaaatcacatcgttaaagtgggcgaagtcaattactatgtctcacgcgcactgattaccgatgtgcccgagatgctagccattgaacgggccgtatatgcgggacagacaccgtgggatgaaaatgcgtttaagacggaacttcgccgacagagcggtcgtttctatattgtgatgcgtcatgaagatcgcctcgtcgctttttgtggttgtgtctttgatgatcgccgccaagatgcacatatcaccaatattgctgtacatcctgatgttcaaggccaaggactaggccattttatgatgcaagtcatgatgaagcgggcgcgtaagttgcattaccaaacggtgacccttgaggttcgttacagtaatacgattgcgcaacaactttaccgcgatttagggtttgaaaagactggtatcaagaaacggtactattttggcgaccatgaagatgctattgatatgacttatcgtattccggtagctacggatgactgaacgacagcttgtcgccagtacgcagcttgacgcgggtcgggccgtccaagtttgttaccagttagcgacattagcatatcccggtggcgcaccttggcggcaagcgacgtttgcggcggatatggcgttaccaacggtacactatgatttattacggtggcaggatgaactgatcgggtttgtcagccgctcaacagtgcttgatgagaccgaaattacgaatattgcaattgatccggcctatcagcgtcaagggcatgcgcggtggttattaacagcctgcttagcacaattatcggcagggtccgtattcctagaagtccgggctagtaatctcgccgcccagcgcttgtatcagcaatgcggctttgaccagattgccacgcgtaaggaatattatcatgatcccgaagaagatgcgtggatcatgcgtaaaatgattaattaaaaggatgggaaccgtggaaaaacaaaacttgattttagcgtttgagtccagttgtgacgagactagtgtggcagtgatcaaagatggccatgagattttatccaacgtgattgcaacgcagattaatagtcacaaacggtttggtggcgtggttcctgaagttgccagccgtcatcatattgaacaaattacaatttgtattgaagccgcacttcaagaggcacacgtgacgtatgctgaccttgatgctgttgccgtgacgtatggccccggtctagtgggggcactgttagtcggtgttaatgcagctaagacagtggcatacgcgcaccaattaccgctgattccagttaaccatatggccgggcacatttatgccgctcggtttgttaagccattcgaatttccgctaatggcactattagtttctggcggtcatactgaattggtctacatgcaagcagatgggcagtttgagattattggtgagacacgtgacgatgcggctggtgaagcttatgataaaatcggtcgggtattgggtgttccatatccggcaggtaaagtcattgacgagatggcacatgcaggtcacgacactttcaaatttccgcgagcaatgattgatgaagataattacgattttagttttagtgggctgaagagtgcgttcatcaatacggtccatcacgcagatcaaattggcgcgactctggataagaacgatttagcggctagctttcaggccagcgtggttgatgttctgatgagtaaaacgttacgagtcctcaaacaatatccagttaagcaattagtcttagccggtggcgttgcagctaatcaggggctacgtgaacggttacaacaagatttaccaaccgcttttcctgacacagaactaatcttagcgcctctaaagttatgcggtgataatggtgccatgattggtgctgcgggctatgttcaatatcagcatcaccaattcggcgacgcggcgctgaatgccgatccaagcttagaatttgattggatgccaggtatgttgaagtaatgaagcagttataaacgggtgtgaaaagtcagtccttttcacacccgttttagtatcttttcattaattatgattaaaagaggatgattcctagaatcaaaaatgaccagcttaagcccgctggaaatagttcaagttagtgtaaacttgcttagttagttcgtcctacaccgacctccaggcatttctgccaattgccggaacgtggtgggcacagatttgagccgaaaaaccacgtctcaaatactggcctttcactaaccaagcacaggacgcttgctaagtgaaatttcaccactgggcattgtcagaaacgccttccagtcgggatagcgttcgaatggctgataggggcgtactcaacttttgctggatttgtcgttgtttttcataaacgttaattttatcaatcaactgtcagattgaaaaggtcttgtgataactcactatttctgaattaccgtagtaataattgaatatttcgaaaaagtggagaaggcactctgatatttgacttaaagggttcagtatcaaaatagccaacgacaaattgtaccgagttcagtggccgttcatcagccattcgagcggcatcccgactggaggggctgggtgacaatgctcagtagccaaattattcttagctggaagtgggttccttccggcttagaataagactcaaatcgacgtcggcttacgttccagcaattgtcacccagccccggaggtcggaatcggacgcgcattgctgacgaacaggaacccacctaaccggcacctttcaatcatgatttatgccgcggataggggcaaaataatagtcgccttaagaattatattaattcttgaggcgactattatttttatctgatgagtcattggaaaattagctcaattcttctaaagcttcagcttgttcggtccattcggtttcaacttgttcttgttgagtattgatggcttcaagttctttttgtaggtcttgtagtttaccaacatcggccgatacttcaggttgcgccatttcagtttgaatctgtgtggcttgttcatctaaggcagtcatctgttcttccagggcggcaactgagcgctcgagcttgcgcttttcacgttgttgctgcttgctggcttggtaattttgctggcctttggagcggggagcagcagttgtggcactggttgaatccgctgcaccggcttcagcagctttttcggccgcttggctagcagccgcagccgcgatttcagcttgctcttgtttcttgtcgatgtagtagtcgtaatcacctaagaagagttccgtgccttccggagaaacctctacgacactcgtggcgacttggttaatgaagtagcggtcatgtgacacgaacaaaagggtgccgtcaaagtcgttgagggcgacttccaaaacttcacggctatcgatatccaagtggttagttggttcatctaagattaagaagttgtcattttgcatggcaagtttggtcaacagtaaccgggctcgttctccaccagatagggcatgaacgggtttatcaacatcttcaccagtgaagagaaaactgcccaaaatggtacgaatgtctttttcaggagtggtgggatgttcatcccaaagttcactgaggacggtttttttgtcgtttaaattacgttgctcttgatcgtagtagctcgtaacgacgttggtgccaaaaacggcctggcctttaatgaatggaatctgtcccaaaatactctttaggaaagtcgattttccaataccgttcggtccaacaatggcaatagcttcatgtttcttaatattcaagttgtcgggttccgaaagaatctgaccatcatagcccacggctgcatctttgacggtcaacacaatgttgccgctttgtttagccgcatgaaagccaaagtgggcagtcttctcgtcactatcagggcggtcaaggcggtccatctttgctaactgcttacgccgagcctgggcccgttttgtcgtagaagcacgcacgatgttacgattaacaaagtcttcaagcttgctgatctccgcttgttgcttttcataatgtttccattgtgcttggattcgagccgctttttcttgcacaaactggtcgtagttaccagtgtagtgcaccatttcatggtgtgataagtcatagacttcgttaacgacccggtctaagaaataacggtcatggctaacgattagcagcgcaccagagtaagactggagatagctttccaaccaagtaagagtttcgacgtccaagtggttcgtcggttcgtcaaggataagcaagtcccgtttttcaagtaacaacttggccaaggccaactgggtcttttgtccaccggatagtgccgtcaccgacttatcgtacacatcggcgtcgaattggaagccgtgcaacacgccccgaatctcagcttggtagccgtacccgtttttttgttgaaattcagtttgaatctgatcataggttttcagggtctgttgataagcctgctcatcattcatgattgcggggtcgctcaattgattttcgagctggtgcatccgtttttcgatggcatgtaactcagcaaagacactactcatttcttcccaaatcgtattgttactatccagtccttggtcttgcgccaagtaaccgattgttaagcccttgcgcattgaaatctggccttcgtccggtaccgtttcgccggcaatcattttaagtaaggttgattttccggccccgtttcgaccgacgagggccacccgagcgtgttcttgaatatccatttgtacgttatcgaacaagacatcggcgccaaaacgccgcataacttgctgtacttgtagtaaaatcacgctttattaagctcctttcacatttaattcgtgacataattgtagcatattgtaacggcctgacccaattattcggaataataagtaattattatttcacaaagtcacgcgttatgctagaatagtgtcagcaaattcacaaacttttaattaggaggacacgtccgaatggcagaaacaaaaattccacgggcaacggcaaaacggttaccgatttattaccgctatttaaatatcttgctagatgcagataagaagcgggtctcatcgaccgagttgtccgaggcggttaaagtagattcagcaacgattcggcgagatttctcgtattttggggcgctcggcaaacgagggtatggatacgatgttgaaacgttacttgcatttttcaaaaagattttaaatcaagacaccttaacgaatgttgctttaattggggtcggtaatttgggccacgccctactgaactttaattttcacaaaaacagtaatgtccgcatttcagcagcatttgatgtcaacgaggcgattgccaatacagtccaaagtggggttccagtgtacccaatgacggagctcaaaaagcaattgatcgaacaacagattgagattgctatcttaacggtgccaaccacggttgttcagaaaattaccgatgacttggttgatgcaaacgtcaaaggaatcatgaactttacgccgttacgaatctccgttcctgagacagtacgggttcagaacgttgatttgaccaacgaattacaaacattgatctacttcattgaacattacggtcagcaattaggtgacaatggtaatgacgatgaaaatgagactgaagattaataactcgctttatctttgaaattaaatggctataaaaaggcttctctgaattattcaggaaagcctttttaacatacttagatcacgaatcattgattgtaacgtataaatattcggtgaaaattaacgttgaaacgctaggttagcgctacctagtaatgatactagtgcagtaagcctaataatgtgggtaacacaaccgatgcgttcattaggatgtgagccgtcatcgatgtttgaatccgaccggtgtgctggtataaccagcagaataataacccgataaaggcatagaggataaagtgaccatccgcatgtgcaaagctaaatagcacactagaaatcaaggccgccccaatctgaccagtaaccgcacttagattgccaaagataactttgcggaagacgatttcttccataatcggggcaccgacaatgatggctaagaagaaagcgggatattgttgcccaacagttaagagggtggtcgtgttggttgacgctgttgactgtcccagtaaagccgtcatttttaaaatgatgacttgaccaacgatgactaggacaagaccgatcaatccccagatgaacgtcatgaaccagttacttggttgtttttcaacaacgttttttgtccgcatgcgactcgccaaccagatgagtaggattgcaccgactaagtagtcgaccgtttgaatcacgaatacttgggcccctagctgatggaaagcagtcacaaggacgctcggtagtgcgtaaataataaagtagatgataagaataaagattgattggcggcgattaaccatcaagtcacgtccttttaaaagtttgatttaagatttattgatacttcaatagtattcattatagtcgatttgacattctttgactaataattgacaaatcacttgcaatcttgaattaaaatgatatagttgacaatgtaattagcacttgaggttgaggagtgctaaaaaagaataaatggagggattcacgtgttaaaaccattaggagatcgcgttatcttgcaacaacaagaagaagaagaacaaacaattggcggtattgtcattgccaataacgctaaggaaaagccccaaagcggtaaggttgttgccgtcaatgacggtcgtgttttagataacgggacaaaagttgaccccagcgtgaaggtcggcgatcaagtattattcgataagtatgccggtaccgaagtcaagtatcaaggtgttaagtatttggtattgcacgaaaaagatatcgttgcaatcgaagactaatccatttaaattgcgcaacttaaaataaattaaattcatgaggtgaatagagataatggctaaagaattaaagttctctgaagatgcacgttcagcgatgctaaaaggtgtcgatcaattagctgacacagttaagtcaacgttaggtcctaagggtcgcaacgttgttttggaacaatcatatggttcaccaacaattactaatgatggtgtaacgattgctaaggcgatcgaattagacgatcatttcgaaaacatgggtgctaagttagtttctgaagttgcttcaaagactaatgacatcgctggtgatgggacgactactgcaacggtcttaacacaatcaatcgttaatgaaggtatgaagaacgttacggccggtgctaaccctgttggcattcgtcgtgggattgaagaagctactaagacggcggttgactcattacacgctatggcacacgaagttaagacgcaagaagatattgcgcaaatcgcttctgtatcttcagcaagtgaagaaactggtaaattgattgccgaagccatggaaaaagttggtcatgacggtgttatcacgattgaagaatcacgtggtgttgatactagtttagacgttgttgaagggatgcaattcgaccgcggctacttatcacaatacatggttactgataatgataagatggaagcggatcttgacaatccatatatcttaattactgataagaagatttcaaacattcaagatatcttaccactattacaatccatcgttgaacaaggcaagccattgttgatcattgctgatgacatttctggtgaagctttaccaaccttagtcttgaacaagatgcgtgggacgtttaacgttgtcgccgttaaggcacccggttttggtgatcggcgtaaggaacaattacaagatatcgctatcttaactggcgggacggttatcactgacgaccttggccttgaattgaaggacacgaccatcgatcaattaggtcaagccaacaaagttacggttactaaggataacaccaccattgttgaaggcgctggttccaaggatgctatctcagaacgggttgaatttatccgtaaccaaatcggtgaaacaacttctgactttgacaaagaaaagttacaagaacgtttagctaaattagctggtggggttgccgttgttcgtgtcggtgccgctactgaaactgaattgaaggaacgtaaataccggattgaagatgctttgaacgcaactcgggccgccgttgaagaaggctttgttgctggtggtggtactgctttgattaacgttatcaaagatgttgctgcattgaaggaaactggtgacgttcaaactgggatcaacattgttaaacgtgctttggaagaaccagttcgccaaatcgctgaaaatgctggtttggaaggctctgttatcgttgaaaagatgaaggaacaaaagccaggtgttggtttcaacgccgcaactgatgaatgggttgacatgatcaaagctggtatcgtggacccaactaaggtaacgcgttctgctttacaaaatgccgcttctgtttcagcccttctcttaacgactgaagccgttgtcgctgaaaaacctgaagaaaatgcaccagctgcaccagccgcaccaaacccaggtatgggcggtatgatgtaaacaaatcgtaacattaagcacttactcggctgagtaagtgcttttttagtgctgttagggtgtgaatcgactagaataaaggtattgatttatccatattagagcggtaggattagtcgttaacgcaaaatgtgggtgcggtgaagcacccgacatttaactggtagtatttggcagggtaaagtagtagaatctactttgactcagtttactttgggataattattttggaataaaggagttattatcatgtggcgttatttaaagcggttagttattgggaaaccgttaaaaaccatggacgagggtgggcaagcactcaccaagttcaaggcactggcgctgctatcgtcagatgcgctatcatcggtggcttacggtactgaacagattacgaccgttttgattacactttcagcggccgcgttgatgtatcaattgtacgtggcggcgcttgtgttagtgctgttgtttgctattacgatgtcgtaccgacaaattattcgggcttatccatctggcggtggcgcctacgtggtggcaagtacgaactgggggcggccagccggattagttgccgggggatcactgctggttgattatatgctgaccgtagcggtttccgtcacttctggtactgaagcaatcacgtcggcgattccggcgctagctaattatcaagtattgattgccgtactgattgtcatcgccatcatggcgttaaatttgcgtggaatgcgcgaatccgcatcattcttaacgtttcccgtttattttttcattattatgattatcggcatgattctatggggcgttatgaatattgcgagtggtaacttaacttaccacgcctccgcagcagttggagcaccggttcaagggatgaccttggtgctgttcttacgggccttttcttccggttcgtcttcgctgactggggtggaagcaatcagtaatgcggtgccaaacttcaaacgaccgaaacgcaagaatgcggcgaacacgttagcaattatgtcattagtcttggccgtcttctttggtggtattacttatttaagttattacttaggcgttaaaccacaagtagacaataccgtcttgtcacaaattgctacggcggtctttggtcacggcttattctactacttgttacaattatcgacggcgttaattctggccgttgcggcaaatactggtttttcagcctttccaattttagcttataacttggctaaagataaatttctaccacatgcttacatggatcgtggggaccgcttgggctactccaatgggattatctcattggcggtcggggcaattgcgttgatctttatctttcatgggaagacgacgcttttgattccactttatgcggtgggggtctttgtcccatttactttgtcgcaatctggtatgattattcattggttccgcgaacgggggcaatggtggtggatgaaggcggcggtaaacttacttggggcgttgatttcgattctcctagtgattttcctattcttgctacatttcggcaatgtttggccatacttaatcgttatgccactcttactgtacatgttctaccgaatccacgtgcactataaccgggttgcggcccagttacgcgtggttgccaaggaaaaagcggcgattcatgattatgacggtgcaacggtgatcgtcctcgtctcgaatgtgacgcgggtaactgctcaagcagtcaactacgcgcgatccatcggagattacgtcattgcgatgcacgtgtcctttgatgagaaccctgaaaaggaacacaagacggcggcagagttcaaagagaccttcccagacgtccgtttcgtggacatccattcgtcgtatcggtcgattgcaacaccgacgttacgattctgcgatgtgattgctaaacgagcagcggaacgcaacttctcgacaacggttcttgtcccacaattcgtgccgaagaaaccatggcagaatattttgcataatcaaacgagtctccgattacgagcggtattaaattctcgtgaaaatattattgtttcaacttataattaccatttaaaagaatagtgacttagtattgaaacccggtatagctaccgggtttttatttttgtgtcataatatgagtaactaaggttataatttagatacttaatcagcccagtgaccggcaaatgtgaacgaattgtgttgcctttactaagttttagtgaagcgagttgtcaagcgtcactgggatttgtataattatcgtaatagagtgagaagggagttacgcacaaatgatcagatttgaaatcctagtaagcctagtggcgaccatgatactttctgcgatcttgacgccgtttgtgcggaaacttgcatttaaaattggtgccgtggataaaccaaatgtacgacgggtcaataaaattccaatgccgacaatgggaggcttggctatttttatctcttacaccgttgggacgactgtgttgtatctcatgcaccagtttcccagtcgcatttttttcgcactactcggtggtgagctgatcattattgcgactggtgttatcgatgatatttatgagctaaaaccacggcaaaaaatgttagggattacgttagccgctttggaggtctactttattggtggtatccgaatgacgaccttcacgttcccgttgctggggctgattcactttcagtggctgagtttaccggtgactttactgtggatactggctatcacgaacgcggtgaacttaattgatggactggatgggctagctaccggtgtttcgattatttcgttgagtaccatgggaatcatcgggttgttcttcttgaatgctaatatgttcgtttcgttgttgatttttactttagttgcggcgatgattggctttcttccgtataatttctttccagctagaatttatctcggtgataccggttcgttgtttatcggctttatgacggctgtgttctcattatttggattgaaaaatgtcaccttaatctcagttggtattccggttatgatcctgggagtgccaattacggatacggtgtatgcgatgattcgacggatcctgaataagaagcccatttcgcaagcggataagcatcatttgcaccaccgcttgatgcaattaggattgacccatcgacagactgtgatggtaatttatgggattgcacttattttctcatttatttcattgctctatccgatctcatctatttggggttctgtgttattgacgattggtttattatttgggctagagttattcgttgaagcaatcggattagctggtgacaatcggcaaccgctactggattggatcaaacggaccgtcgcgcgtttgacctccaagagtaatcattaaaaaccaaataaatcattgaaaattattaaagtgttacaggcatctaccgtgtgattagcggtgatgcctgtttttagttggtcatcagttggttcatcaatcttaactttaccaaaactatacaagcaatttacacaatcgtcattcacaatttacaaacgattagtaatattaagcatgttccgaagcaatcaattacgtgtaaccgtcggacggtgatgttgctccatcattagtcgtagcactcctacccagttttgctatgatggttgccgggttggttgcttaattttgatagtcaattgaagaaggggagtttcaattatgaaaaaagcactgacactcggcgcattggcagtaacgatgaccattttactagctggttgcggcagtagctcagccacaagtacgaagagtactagtagcagtagtggtagttccaagactactaagatcgttgcaactggttcaaccgctttacaaccattagtggaacaggctggacaggcttaccagaacgaacatgctaacgtgaccattaacgttcagggtggtggttcaggagcaggcttaagtcaggtggcgaagggttcagtcaatattgggaactctgatttatttgcacaggaacaaaaggggttagacgccaaagggttagttgaccataaagtggctgttgtggggatggcacccgttattaataaggatgccgatgtcactaatatttcaaaagaacaacttatcaagattttccaaggcaagatcactaactggaaagatgttggcggtaaggacgaaaagattaccgtcgttaaccgtgctcaaggtagtgggacccgggcgacgtttgaaaaatggggattagacaacgcgaaggtcgcaactagccaagaacaagattcgaatgggaccgttcaaaaaattgttagcaccacgcctggtgccatcagttacttagcattctcatacgttaagagtgacgttcaggcgctttctattgataacgtcaaaccaaccgaagctaacgtagcgacgaacaagtggaagatttgggcttatgaacacatgtatactaaggggcaaccaactggggagttgaagaacttcttaacttacatgacttctaaagccgttcaaggtagtttagttgagaaattaggatatattccattgacttcgatgaaggttgatcgtggccaatctggtgcaatcactaatttaaaataaataacagacaaaaagtcgagcgatagctcgactttttttatgggccgcaattagtgcaacgcggactttaacaatgaaaaaacaaatcatcggctcaagtgctgggtgttattgttaagacgagttggctgtttcgattttgactgccaatcaaagtttgtgaggctcccaattatatataaccagcaatctagttgccaggcgtagtgaccggaatttctgtaaattgttcaccttgctccgaaaaggtaacttgaccgctcaagaggttagtgatgtcctgctgaatcgttgcaatttcggattgagtgactgcgatgatttgtgtgacttgaacaccgtagtcggtattcagggtcgttagcttattttgttgtaaatagtaggttaaagcatcgacgttacgatagtcgagcgtgatggcgatgcgggtttgtaagattcgctgaaccttaccactgacttcaattgcttgcgcgggggtgccattataagctcggatcagtccaccggcgccaagcttgataccaccaaaataacgggtcacgaccgcaagcacgtcgtgtagctcgttggtcttgagcacttctaagattggtgagcccgcagttccgactggttcaccgtcatcactcatccgctgaatatgatcatcatcaccaagcatgtaggcgaaacagttgtggttggccttaggattatctgctcgaacagcggcaatcttagcttgagcatctacttcgtcactgatgcggtatagatgagcgatgaagcgagactttttgatggtttgttcaaataccgtgtcttgggtgatggtgtagtagggtttagtcaaattaatcggttcctttcgtgaataaatcgttaaatggcgtacttgataactaaggaggtgcgcacaatggaagcacaagtcttatacggtcgtcagctcgcattatctgcaaatgaggctgccgcagtacctgctggcacgcagatactgccagccatgcaggttgatgaacatcaaattatctgtcagcgttgcggcagtcacttggaccgactgcgagcccaattacccaatcagcaatattactgttatcaatgtttaaatttaggtcgagtgagtacactagttaaactctatcatatgccagaaccgaatgcttttgcaacggtcccggtttgcacgtggcaaggaaccctaacgccccagcaagcggactgcgcgcaatcaatcaaagctaacttcatggcgcataaacggcaattattatgggcggtgacgggagctggaaaaactgaaatgctgtttccaggtattgcgtgggcgttagcgcatcagtggcgggtcgccattgcttcaccacgagtcgatgtttgcttagagttagcaccccggctccaggcggcctttgctgatgttcaaattgctgtgctatatggccgcaatcccgctccctatcagtatacgcagctgacgatttgtacgacgcatcaattgctacgttttcgtcaggcgtttgacgtattgatcattgatgaagttgacgcgtttccgtttgctgccaatccccgtttggcgtttgcagtgaatcaggcagctaaggtggagggggccattctttatttgaccgcgacgcccagccaaagtttgttgtcccaagttcatcgtggtgagcttgcaatcagttatttaccattgcggtttcaccaacatttattaccggcaattaaggttaagctacagccaaattgggctcggctcttgcaacaaggaaaattaccacgagaccttatccggcaactccaacagtatcaacaacagcaccagcgctttttactatttgttccgcgcatccaacaattagcgccagtgtttgcggtactccaacactattttccccatatgaccggagagacggtgtactcagccgatcctgagcgactgactaaggttcaacaaatgcggaaccagcagtttcaatacttagttacgacgacgatattggaacgaggggtgacgtttccgggaatcgatgtgattgtgcttggtgcggacgacgaagtgttttctacggctgccctcgtccagattgcaggacgggtcggacgcagcagtgagcgtccgactggcctcgtctggtttatttgtcacagtcatagccgcaatatcaaacgcgctcagcgccagattcgggtgatcaatcgaaaggggcgacaattacgtgctagcatgcctactgtgtcacaacattatcacgactaagtttacgttgccctggattcttagctggcagccggttatgcggccggtcgtctgctcggtttgttggcggcaatttgtacgcatcgatcgggcaacggcatgttccaaatgtggacgtgctcaaaagcgaccgcaaccgtgtacagattgtcagtggtggcctgaaatcggtccctttcataacgaggcgttgttcgaatataatgatgcgatgcatgattattttcaacgctataaatttcagggtgattatcaattacgccaagtctttgcgaagatcatgcaacaagcagtggtacaacggtgtgctgagatatgcttagtggtacctgtcacgcccacaacattgcaaacacggggctttaatcaagttgccggctggttagccgcacccctcgcgcccgggttaatgacccaggcaacagcgaagtcagtgccacaatctaagaaagaccggcaagcgcggttgagaacaccacaaccattcaagatggctcctaatacgattttggccggccggcgggtattattagtagatgacatctatactaccggccgaacgatgcgccacgcggcaacgctacttttggaaaacggtgccaagagcgtgacggggctaacgctagcacgttaatttcgagggaaagtggtatttggattgtttattatagcgctttctattataatgaatttaagcaaagtaattaaagagtggtcctttaattactttgggtacacagcaatgtgtgtgaagggagagaagatctatgctaaattttaatattcgcggtgaaaatatcgaagtgacccaagcaattcgggactacgttcaaaaacgggtgggtaagttacagaagtactttgacaataatgttgactcaattgcccatgtcaacttaaaagttcacccagacaagacggctaaagtcgaagtcaccattccacttccctatttagttctccgggcagaagaaacttctcctgatatgtatgctagtgttgatttggttactgacaagttggaacgccaaatccgcaagtataaaactaaggttaaccgcaaatcccgtgaaaagggttataaagcgattgattttgcagcgactgatgaaacagttgccgctgccgacaatgatcaggacgataagttagacgttgtacgtacgaagcgagtggctttaaagccaatggataatgaagaagcgattctgcaaatggatatgctcggccatgacttctttatctacgaagacgcggaaacggacgcaattaacatcgtctatcggcgtaacgatggtcgttacggtttgattgaaaccgacgacaatcactaattttaaaagcgcaacttatgaggactggtcagttgaccagttctttatttttatcccggaacgcccgtataacatattgtgatcatgagagtgacttagcccgcgttagtaagctgaagttcgactcacggcacgtttttgccagcgactcaagacagttaagcaaatattgatagaattaaagaacacgggtcagtgattgttgggctgtggttaaagactaatatttagttaaggatgtaaataaaacggtcgacggtatcggttacataggggcctgtggttttcattgctagtaaataatggtaaaatgacagatggtattttattttgaaatggacaattgaaattaaaattaagattaattatttggagaggatacgtaaatggccaacattttaaaacgctgggttgaaagcgacaagcggactattcggcgtctggataagattgctaataaagttgaagcttatgccgacgaatacggcaagttaagtgatgctgacttgcaagcgaagaccccagaatttcgtgaacggtacaaggagggcgaatcgctcgacgatttgctgcccgaagcatttgcaacggcgcgtgaaggtgcgaagcgggtacttggtttatacccattccacgttcaaatcctcggtggaattgttttgcatcaaggtgacattgctgaaatgaagactggtgaagggaagaccttaacggccactatgccagtttatttgaatgccatctctggtaagggtgttcacgttgtaacagttaatgaatacttatcagcgcgtgatgcgactgaaatgggtgaactgtataactggttagggatgagcgtcggaatcaacggggctgaaaagtcgcctgaagaaaaacgtgccgcttataacgccgatattacttattcgacgaacggtgaaattgggttcgattacttacgtgataacatggtggtctaccgtgaagacatggtgcaacgaccacttaattttgccatcattgatgaagttgactcaatcttaattgatgaagcccggacaccgttgatcatttctggtcaatcagaaggtacaacgggaatgtataagcgggctgaccgttttgctaagacgttgacgaaggatgaagattacaaggttgacttggaatctaagacggtcgcattattagacgaagggattcggaaggctgaaaaatactttggcttggaaaacctttacgatactgataatacggcgttgaaccattacttggatgaagctttgcgtgcgaactacatcatgttgaaagataaagactacgtgatttcagacggtcaggcgttgatcgttgattcctttacggggcggatcatggatggtcggcgcttctcagacgggttacaccaagcaattgaagctaaggaacacgttgagattcaagaagaaaccaagacgatggcgaatatcacgtaccaaaacttattccggatgtacaaaaagttatctgggatgactgggacggccaagacggaacaagaagaattccgcgaaatctataacatggaagttattacgattccaacaaaccgcccgatgattcgtgatgaccgttcagatttgctttacccaacgttacaaagcaaattcaacgcggtcgttaaagaaatcaaacaactccatgaaaagggccaaccaatgttaattgggaccgttgccgtggaaacgtcagaatacttgtcgcatcgcttggatgaggaaaacattccgcacgtggtcttgaacgccaagaaccatgcgaaggaagctgacattgttgcaaacgccggtcaacgtggtgcggttaccattgccaccaacatggctggtcgggggaccgatatcaagttgggacctggtgtcaaagaagtcggggggctcgccgttattgggactgaacgtcatgagtcccgccggattgataaccaattgcggggccgtgctggtcgacaaggtgatcctggtatgtcacaattctacctctcacttgaagacgatttgatgctacggttcggttcagaacgaatcaagaacttcctgcaacggatgaatgttgaagatgatgatgcggttattcaatcacggatgattactcgacaggttgagtccgctcaaaaacgggttgaagggaacaactatgactcccggaagaacgttttacaatatgatgatgttatgcgggctcaacgtgaagtgatttatggcgagcggcaacaagtcattatggaagaaaaatctttgaagcccgttatcatgccaatgatcaagcggaccgttgaacggaccgttcagttacacatgcaaggcgatgccaaggactgggatttagatgcagttgttgactttgcccaagctgctatggtgaaggaagattcaattagtgtggctgacttgaaaggtaagtcgccagcagaggttgaagcttacttgatggaccgggtcgataagatttatgcggacaaggctaaacagctttacgatgcgggtcagatgctagaatttgaaaaagtcgttattctgcgagtggtcgattctcattggacggatcacattgatgcgatggatcaattacggcaatcgatcggtttacggggctatggtcaattgaatccgttagttgaatatcaacgagacggttaccagatgtttgaagaaatggttgcggatattgattatgatacgacgcgactcttcatgaagtctgaaattcgccaaaatattcaacgttaaaatttaacgttagtgctagcgagtctaagactaaggtcttaggctcgttttacagttaaaccagatattaaataattaataaataagttgaaagaagggtcctttgtggaattaagtgaatataaacacctgattgaagaaatgcaaagtgctgtcgacgactttagggggtcgctttgacttagatgctttgaacgaaagcattcaagaaaatgaagctcgaatggccgaacccggtttttgggacgaccaggctgccgcccagaaagtcatcgatgagaataacgtgttgaaaggaaagtatgatacgtttaagcaattagctgatgaagtcggtgacttggcagtcgcttatgagttactgagtgaggaacccgatgctgagatgcaggctgagtttgaaacggactttcagcacgctgaacatgatttacaacagtaccggctcaacttacttttggacggtccgtacgaccgcaataacgctattttagaaatccatcctggagctggtgggaccgaatcccaagattggggtgcgatgctactaagaatgtacacgcgctgggctgcgagtcacaatttcaaagtcgagactgttgactaccaagctggtgatgaggcaggcattaagagtgtgactttattaattagcggccacaatgcttacggttatttgcggtcagaaaaaggggttcatcgtcttgttcggatttcgccgttcgatgcggctggtcggcgccacacatcttttgcgagtgttgatgtgatgcctgagttagatgataccgtggatgttgatattcgacctgaagatttgaagattgacgtttatcgagccagtggggccggtggacaacatgtcaacaagacttcttcagcggttcggattacccacgtgccaacgggaattgtcgttgccagtcaagcgcaacggtcacaattacagaaccgacaaacagcattgaacatgttacgagcgaagttgtacgaacgtgaagaagagaagaaggctaaggaacgggcggccatccaaggtgagcaaatggacattgggtggggctcacaaattcgctcctacgtttttcatccgtatacgatggtcaaggatcaccggactaattatgaatcacatgatgggcaggctgtcatggatggtgatcttgatccgtttatggatgcttacttacaatggaaattagcccagcgtaatccgcaatagattgcacaaatactaaggtgacctatcattgcgcaggtcgtcttagtattttttggctactagtcttataatatagagatattaaagcggtaatagcaggactgacggaattgaaacggcgttggtctccttgggcaaaaatgctatactaacttcagagtttaacgttaggggtcacgcacatgcaggtattaaagatttttgaattgtttcttttacaaccgctagtttggttaggattgctgcgtagttatttaaccgctaaacggcgggtgaagagtgaacggcagcattttcagagtgctatcaacccacaattagttgaagtccaccactttttagtggatggctgtttactaggagttctaatgacaattattagcttggcattgggattagtggtggcccccatctgggtggttatatacgaagtagtggcggccattagcttgatcattattcctggtgcactggtaccagtgaccgcttttggcctcagctggttagtttattggattatgagcccggaattaacgacggtggggggcgctttacaacggcacggtgttgccatgaccagtatgagtggcaatttggtggtgaacggactattgttattagccatcgtgctggcggctacggcggtcttgttacgacactatgattatgagggccgttcaccgcaactacagcccgaccaacgtggaaagcgacttgttcgttaccagtggcaacaattgttggtcttaccagttggggtactggtccccggtgattggttacacgcaactatcagttggtggcctgtgtttatggttggcgagcgctccttcagcattttattgttgcctttattagttgggacgagtgttcgcgtttataagcagctgccacaaattgcatggcggcagttagcggcccgctatggttgggtaacactcgcgagtgttttagttgcaatcattgcccgttttgcagtgctcagcccgcagtggttgctagcattgatgggattaatcgttgtgctaacttggggaatcttagcacagcaccgttatcatgatcgacaccaacagtttcgatattctgatactgaacaaggtgtgcgggtgattgggttacgcccccacacgcccgcggataaattaaatctcgatttaggagatattatcttggaatgtaaccggcaaccagttaatacggaagctgaattttacgcggccctactgaaaagtccgacgtatgttcacctcaaagtgcgcaatcggcaacaggaattaattattaccgaaacggcgatctataatggcgccccacacgagttaggaattgtgttattcactgatcaggaggattaatgaccatggataagattttagtggtagacgacgaaccagctatcgtcacgttattatcatataacttgaagcaggcggggtacgaagttgtgacggcgacggatggtgcggacgcgttgtcattaggcctggcccaatcatttacatgtattttgttagatttgatgttgccgaaactcgatggaatggaagtaacaaaaaagttacgacaagaaaaggttcagacgcctattattattgtgacggctaaaaatgatgagtttgataaagtgttcggcttggaattaggtgcggacgattatataaccaagccgttttcaccccgcgaagtgctcgctcggatcaaagcagttattcggcggacaacgccggacgagcccgtgacaccaccggcacccatgccgcctgctaatcgtgcggtaatgcttgttggtgatttacagattgatcaaaacaaataccgagtcgcgcgcaacgggaaaaatatcagcttgacaccaaaggaatttgaattacttgtgtattttgttgaacgagaaggtcgggttctcagtcgtgatgcgattttaaatcacgtctggggctacgactatgctagtgagacgcggatcgttgatattcacatctcacatttacgtgaaaagattgaagcagatcccaagcagccacggttgatcaggacggtccggggttttggctacgaatttgtgggtgacggccatgcataatcgctggcaacagacgacacggttattgctcatggaaaatgtgttactggttctgatcgtgttggtcgtgttgcagcacttttcgccaattaagtggtcctggcgcctagtcggttgtttagttggtgcttggctggttttggcagtaatcgagggcttgatcgcttggcggcaacaaagtgaacggcagcgcacgatcgaccgtatggaagctaagcttcgtcagatgagtagccagcaatttccaccacatatcttattgccacaatcggaccccttatacagcctagcacaagcggtcaaccagttagagagttatcaaaaaagtcagacgcgccgtgcggaactgcaagaaaaagagttaatgatgattatgcggtacttgcctgtgggagtgatggtcattgaccaccggcgacaggttcaactgtctaatccggcgatgagtgaactattgcaagtctcggttaatacggtggcccacatttataccaaggatattcagctgtacgcgttgactaaattgattgaagatacgattactagtggcaaaaatcaacgggcaacgattacgctgaccccagcgcctaacacgcaggttgtcgaggcttcaaccgtttatatccaaggcaatcgttcacaatttcaaattgtcctgatgttgtatgatatcactgaagtctatatgattgaacaaatgcaggatgattttgtcagcaacgctagccacgagttgaagacgccgattacagccatttccggtttcactgaaacgttgttaagtggtgccaaggatgatccggacacgcttgaccaattcttgcatattattgcggatgaaagtcaacggttgattgatctcattcaggatgttctgtcgctatcgcgaattcgtgctcagaatacgacgatgttaaccttagctccgcttgctgttcgaccattgatcgaacaggaactggctgtagttcagcaggcaatcgaacgtcagcacttaacgatcaataaccaagtcgatgctgatctaatgataacgagcgattcacagaagttgagtcagatcatcaaaaatctgttaacgaatgcaatcaagtataatcgacctcatggtagcgtgacgattgccaccatggtcagtcatcaaacgtggtcgctgatagttaaagatacgggcattggtatcagtgccgatgatcaacagcgtatttttgaacgcttctatcgggcgagtccgtcacgttcacagcaacttgtgagtgggactggactcggattagcgattgttcaagaattggtcaacgcaatgcacggaacaatcgacgttgtcagtcaacggggcgttgggacaactatgacagttacattgccactagctgcgagtgcttccgagcagtagtaaggcgttaagcatacggacagttctgattgtaactggtggtctatcaaatgatgacgtggtgacggtatgagttgtattgctgagtcaaaagatgtcattagttgagaattgaatgtgtcgtaattaagccagacgaattgataacgatttttaaggtaaatgtaaaccttgaaaatcgtttttttgtgcacttttttaattttcctttcataattgggggctaaaagccggtaataattaaaaatatatcgacgtttacacaatctttacaaaactcatataaagcatttacacaaactttgtattattgaatatgagcaatgggtaggaggtatatagttatgagaaaaagtcgggtcatccaattaatcgtgttaatcgcgatcattggactagttggattagggtacacacatcgtgatcgaactagtgccagtgaatcaattaccgcggttggatcaacggccttacagccactggttgaagcagccggtgaacaatacagcagcaaccataccggtgtgtttatcaatgtgcagggtggtggctctggaacgggactcagtcaaattcaggcgggggccgtggcaatcggtaattctgatatttttgccgaagaacagtctggcattacagcgagcaagttaattgatcaccgggtagccgtcgtcggtattgcccccatcgttaataaaaaggcgggcattaccaatttgacgcagcagcaactcattcagatttttactggcaaggtcacgaattggcgtgaagttggtggacgtaatttaccgattacgttaattaaccgtgctcaaggctccggaacccggaagacatttgagcgatacgccttaaagggtaatcagagtgttgattcccaagaacaagattcgtcaggattagctcggtcaattgttgctagtacacctggcgcaattagttatgtggctttttcttacttagacaactcagtccagaccgtcaatgttgatggtattcggccaaccgaaaaaaatgtgcggaataatcgctggtacatctggtcctacgaacatttatatacggggaagcaccccaatcagttaaccaaaaaatttattgattacattttatcaaccgctgttcagcagaagttagtcaagcagttaggttatatttcggtccatgacatgcaagtacagcggaatgcggccggtaaagtttcagttatgaaatgagggagagcgcatggataaaattcgagaaagcttattaaaaaaatcagttgctagtaaaattgaacggcgtggtaaggccattagtctagtttgtctagcgctaattgtcgggattgtctttttgattttctactttgttgcatcacgggggttagcaaccttttttcaaaatcacattaatctatggcaatttctgagtgggacgcagtggaaccccggaacagtcggaacgaatggacaaccagctgtgggggcactaccgatgattgttggatcgtttttgattacgattctttcggccttcattgccacaccgtttgctatcgggacggcggtctttatgaccgaaatttcaccacggcggggggcgaagattctccggccagttacggaactattagttggtattccatccgtagtgtatggatttatcgggctacaagttgtcgtaccgtttgttcgtaatacgtttgggggtagtggctacgggattctttctgggacctttgtgctatttgtcatgatcttaccgaccgtgacgtcaatgacggcggatgcgctgaattcggtaccccgttattaccgagaagcctcgctagctctaggggcgacgcgctggcaaacaatttataaagtcgtcctgcgggcagccattcctggcatgctgactgccgtcgtatttgggatggcccgcgcctttggggaagctctggcggtccaaatggtgattgggaacgcgacgttgttgccgcataacctagtttcaccagccgcaactttgacaagtatcttgacgatgggaatcgggaacactgtcatgggttcattacaaaataatgcattgtggtcattagccatgatcctgttattgatgtccttagtctttaacttagtcattcgctacattggtcgaaaggggaaattaaaccatgaacgctaaacgcatcgataaaattgccactggcgtgctatacggcgtcgcagcctttgtggtcatcatcttagttgccctattgggatacattctgatccaaggggtgcccaaaatttcgtggcattttttaacgtcgccggccctggcttttgaagcgggtggtgggattggcattcagttgtttaactccttctacttactatttttagcgttattgatttcattaccgatttcactgggtgcggggatctatctaaatgaatatgcgccgcaaaatacggtgactggcctgattcggacgaccattgaaattctgagttcattgccatccgtagtcgtggggctgttcggatacttgttctttgtagtgcagttcaagttaggcttctcgattctttccggggcgtttgcgctgaccgtgtttaacttaccgattttaacccggagtattgaggaagcactcgccaatatctcagataatcaacgggaggccggctacgcgttagggctatcacgttgggagacagtgacgaagatcgtagttcccgctgccttaccaagcattttaacgggggtcgtcttgagtgccgggcggatctttggtgaagccgcagctttaatctacactgcgggtcaaagtgcaccagccttggactttggtaactggaatccatttgatatcagtagtccactcagtccactacgtccagccgaaacgttggccgttcatatttggaagatcaattcagaaggaattatgccggacgcgaaagccgtttcggcgggagcttcagccgtattaattattgcggtattgctctttaacttcttagctcgttggcttggcaaacgcttgtacaaacacttaaccgctgaataaaggaggccgttttgatggcagataacacaatgacgacgacacaacgtaacatcatggcgtttgatcctaaagatcatgaaatcgcgctttcaactgaggatttacacgtcttttatggtaaatccgaggctatttcagagggcgatttacagtttgaacgttataagattagtgcgttgattggcccatccggttccggaaagtcaacctacttgcgttcgctaaaccgaatgaatgaccgtattgcaacggttaagggcaaaattatgtatcgcggcttagatattaacagtaatgatattgatgtctatgagatgcgccggcacattggcatggtgtttcaacggcctaatccgtttgccaaatcaatctatgagaatattgcttttgcactccgccagcgcggaatgaacaagaaacaagacttggatgaaattgttgaacggtctttacggcaagcggcgatgtgggaccaagttaaagatgacttaaataaaagtgcgttagctctgtctggcgggcagcaacaacgactctgtattgctcgggcaattgcaatcaagccagacattttactgctcgatgaaccagcgagtgctttggatccagtatcgacaagtcaaattgaagatactttgttagaactaaagcagaattataccattattattgtgacgcataatatgcaacaagcatctcgaattagcgactataccgcgttctttaacctcggcaaagtcctagaatactcagagaccggtgagatttttaccaatcctcaggttgatctgacgaatgactatatttccggaaactttggataggaggaccgttcatgagtacaattttaacgaccgagaacttatcattattttatggtaaaaaagaggccctcaaaggaattaacattgattttgatgataaaggaatcacggctttgattgggccctctggctgtggtaaatccacctttttacgttgcttgaaccggatgaacgatctgattcctaatgtaacgatcacgggtgaggtgaacttcaatggtcacaatatttatgcgcccacgaccgatacggttcaattgcgtaaagaaatcggcatggtgtttcaacagccgaatccctttccattctcaatttatgagaatgtcatttacgggttacggttggcaggagtccatgataaagaacgcttagacgcggcggtagaaaaaagtctgaagcaggctgcaatttgggatgaagttaaggaccggttgcatgccaatgcgctatcattgtctggtgggcaacaacaacgggtttgtatcgcacgcgtcctagccgtcgaacctgatattatccttttagacgaggccactagtgcacttgatccgatatcgagtcggatgattgaagaaaccctattgaatttgcgccaggattacactatcataactgttacgcataacatgcaacaggcgtcacgaatttctgaccgaacggcgtttttcctgaatggtgaattaattgaggtcaacgacacgaaacagattttcatgaatccagttaaacaggaaaccaatgactatatttcaggacgatttggttaggaggaaaaaaacatgcgacgactttttgatgatgaactaaacgatattgatgcaaacttcactgaaatgggaatgatggttagcgagacgattgaaaaggcagtcaaggcgtttatcgaccatgaccgcgacctcgcacaagaaatcattgataatgatgctaaaatcaaccaacgggaagttgaactagaacagaaatcatttgagatgattgcgttataccaacccgtcacttctgatttgcgagaaattgtcaccattttgaaagccgtctctgaattggaacggatggccgattatgcacgtaatattgctcacgctacgattcgggtcaaaggaaatgtgcgcgtccctgaaattgaagcagcgttatcagaaatggggaatcgcgtgcgaaagatggtcgaagagatgttggcagcttacgtcaaaagtgatgatcaggaagcacgccgggtcgcagctaaagacgcaaaagtcggggagatgtatgatcgtattaatgagaaggggatctccaagatggagcgccatcctgagacggtcatcggttccacggattacctgaatgttgcaacttacctaatgcgcatcggggcgttagtaactaatattggtgagtggatcgtgtatttgaatactggtgagattatcgaattgaatccagaaagttctaatttagtgtaactaatcataaataattgcttaaagccggtcgtctagtttgcaaccggcttttacaattagtaagatatggttagataaactgataaggagcgtctaacgatgaaatcaaatacaaaacaaaagttaactaaatctaataatcgcgttttcgccggcgtcctcgggggcattgctgaatatttgaactggaatgcaacgattctacgagtactctacgttattttaaccttggttacccatggctttggtgttttggtatacttagtattaatgacaattatcccaagtaaaccagacaatacgggtttcttcgaacagatgcggcaaagtaccggtactcaagctaaaccgcaagcgcatgggcgcaaagagattcataacgttcatgaagaggatgatccgcgtcactaagattaatggagtgattatacagtgggcttttggaaacgaattttaatcaatacaatcttatttattgcgattgctggcttttttcagagcagttttcacgttgcaagtgtgtggatggctttaattgccagttttgtgcttgcaattttaaacgccgctattaagccgtttttgctgttattatcgttaccgattacgttattgacactcgggctattcagtattgtcatcaatggttttatgcttcagatgacatcctacgttgtgggtaaggccaatttcggcttttcgagttttggcatggcgatggttgtttcgattctcatgtcaattgctaacgtgattgtttccaactttttcgcgaaagacggcgttgatggtgaataaagcgctttaaagtgctaagattagaagatagaaataatccgttttcagtcataaaagtgtggccgcttgaaagggtagcgtaatggcgcgactggacaacgcgggccacacttttttattagtggaacaattaggagggattcttttggcaggaagtgtaaccgttgccgatttggtgaaaaatacgcgcctggatgtgtatcatggcgctgacttattagaaaagaaagatattacaacgagcgacatttcacgtccggggctggcgttgaccggttacttcaactactatcctcgtgaacgagtgcaattgctaggtaaaactgaaaccgcttattcgaaaaatatgagtcatgatgaacgactgatgatttttcgtaagatgtgtcagttaaccacacccgcgttcgtcatttcaacggggttacccgttccagaagaactcgtgcaagccggtgaggaaaatggcgtgccgattttaggaacgaaaatgacatcatcacggattctaagtaatatgacgaattacttggaaggtaaattagctgaacgacaatctgtccacggggtattagttgacatctatggattaggtgtgctgattactggtgattccggtgttgggaagagtgaaacggccctggaattagtcaaacgggggcatcgtttgattgctgatgaccgggtcgatgtctatcaacaggatgaacaaacgcttgtcggtgaagcacccgcaatcttgaatcacttattggagattcgaggtatcggaattattgatgttatgaatctttttggcgctggggctgttcgtcaagataccgacattgaccttatcgtgcaccttgagaattggacgcctgataagcaatttgatagactaggaaatggagaacagaaccggaaattctttgatgttgaagttcctgaaatctcgattccagttaagactggacgtaacctagcaatcattatcgaagcagcggccatgaactttcgggccgagagcatgggctacgatgcgaccaaggtctttgacgataacttgaacaagttgatcaaaacgaattccgtgcatgattctcacaagtaataaggagatggcagtagcgtgaataccgttttaggggcacttaacccaattgcactgcggttaggaccaattcaggtccattggtacggcgtcattattgctagtgccgtcgtcattgcggttgcactagcagtacgtgaaggtcagcgacggggtgttcggcccgatgacatttacgatatgattttatgggcacttccgtttactttaattgcggcgcggacttactatgtgattttccagtggtcatattatcgtcagaatcccggtgaaatcatccgtatctgggatggtggaattgccatctatggtggcttgattggcgccggaattgtggtcattttattctgtcggtcacgctttatcccaacttggctaatgcttgatattgccgcaccaacggtgaccatgggccaaggtattggtcgctggggtaactttatgaatcaggaggcttttggtcgagtgactagtctgagtttcttacaaggcttgcacttacctgattggctgattaaccagatgtatatccgtggcgcgtatcggcaaccaacattcttgtatgagtcggtatgggatctattaggatttgccttactgatgctcacgcgtcatcgcacacattggtataagcagggtgatgtcttcttgacttatgttgcttggtacgcctttggtcgcttcttcacagaagggatgcggactgactcgctcatgttatttaacgttattcgggtctcacaagcgttgtcagtggtactgttctttggtagcattggcttaatgatctggcgccggcgtcacaatccgaataatcgttggtatttagctggttctggtcaaaaggttgtcgcagaaaataagtagattagagggttatttgaatgatgaaaaaaattgccgttttaggtgctggctcatggggtagcattttggcaaatctgttggatgaaaatggccactcagtgcggctctggtcgtactcaccggcccaagtcacagaattaaatgagcaacacacgaatgagcgatacgttcctgattttaaatattcagaaacgttgactgcttattctaatctaacacaggcgattgatggtgcggatgtaatcttgtttgtcgtaccaaccaaagcgattcgcgaagtggcccaacaagtgactgccgtgcttgccaagacccatcagcggccgattattgtgcatgctagcaagggactcgaacaagagacacacaagcggctgtcgcaagttttggcagaagaaattcccgccgaattacgacaagcgatcgttgtcttatcgggccctagtcatgctgaagaagtggcccgccacgatattacgttgattacggcggctagcgccgatgaatctgcagccgaattagtacagcaactcttcatgaatgactatttccgcatttacacgaataccgacgtggttggtgttgaactaggtgcggcgctcaaaaatatcattgccctgggtgctggtgcgctacacggcctgggctatggtgatgacgccaaggcagccttaatgactcgtggtttagctgaaatcagtcggctcggagtggcgttgggcgcagagccgttgacatttatcggtttatccggtgttggcgatttaattgttacggcaactagtgtccattcgcgtaactggcgcgctggtaatgagttaggtgctggtcaggacctcaagacggtgattgataccatgggcatggttattgaaggtatcccgtcaactaaagccgcttacgagcttgcacagcaacaaaatatcgaaatgcccatcactgaagcgatttatgatgtattatataagagtgccgacattaaggaagtcattccacaattgatgcggcgcgaggggaaacctgagattcagtaggaatttccaaactaatttcactatttttaggaggatttatcacatgtcaaaagttagaaaagccgttatcccagcggccggattaggaacacggtttttgcctgctactaaggcgatgcctaaagaaatgttaccaatcgttgataaaccaacgattcagttcattgttgacgaagctcgtaaatcggggatcgaagacattgttatcgtcacgggtaagagcaagcgtagtattgaagattactatgattctaacccagaattagaggataacttacgggctaagcacaaggaagaaatgctcaagctggttcaagaaaccacagacattaacttgtactttatccggcaatcacatccacgtggtttgggcgatgccgttttaacggctaaagctttcgttggtgacgaacctttcgtcgtcatgcttggtgatgatttaatggaagacaaagtaccgttaaccaaacagttaatgaatagctatgacaagacacatgcgtcaacgttagctgttatgaaggttcctcatgaggaagtttctaagtatggggtcatcaatcctgaaagtgaaaaggaaccgggcctatacaacgttaataactttgttgaaaagccatcacctgaagatgcgcctagtgatcttgctatcattggtcgttacttattaacaccagaaatttttgatgttcttgaaaaccaaaaacctggtaagggtgacgaaattcaattgacggatgccattgatacgttgaacaagactcagcgggtctttgcccatgaatttaaggggactcggcacgatgttggctacaagtttggctacttgaagacgacgatcgaatacgggttaactcatccggatgttaaggctgacttgcggacttacatcaaggatcttggtgctaagttatctaaagaagatagcgccgctcctaaaacaacgaagaaaccaactaaataatacttgattaattaaaacaaccgtgaaatctattaagatttcacggttgtttttagttaactgctgaataattgcgattcactaattaagctggcacctagtggtcggcttttaatttgaataaatggggcttgccataataataaccttggcgtagtgaaatatttaagtcattcgccatttgatcttcggcatcgttttcaacaccctctagaattaaccggatatcatgttgtaccgcaatgtcgcgccagaattttaattgaatgggaatctcgttttcacgatcttcggcccgaaagttttgcatggcgaatttgatttcttcggccgattcgagtagcggtttaatgtggtcgtaaacgttgattcccgtgccaacgtcatcaatgctaaattgtaggccgttagccttgtacttatcaatttgttgttgcatcgccgccagtgtaaacgtatcttcaccgggttcttctgtgacttcgacgataacatgaaccgggaatagctttttctgagcatcaatgactgcggcagcaatatcatcatttagaaattgcttgcgattaaagttaattgatactgacccgatttttaatgcaagctcactagccgtagcctttagtaagctgacttgtacatcgatcggaatattatcgaagctttctggtaaggtccaccggtcctgatcagtctcacgatagcgaatcagcatctcgtagccaatcagtgaattattaaatttatctaactggggctgaataaaatagcggtacataagggaactccttagacttgaattaacacgatttgatgcttcctaatacatactataccaaaaaatgaataagtgaaactgtttgacaccatcttttttttgcatggtatcgattatcaatcgggctaatgatgattgtgctaaactgcttggtgaacaaggtaattttctgaaaatgagtaaaaagtcaattagtggttacctggcaaagctggtatggacgatattgtgagaataactgcttgccagcgtatcgctgattggtttttaaaagtagttatgtttcatcatgacctgtatttatattaactagagttatgtatttgcgcagtaaagcggttataatatacctatggttaaataaataaaattataattgggagcaaaatgaaatgaagattgtaattgttggatgtacgcatgcggggaccgctgcggctgcacaaattctgaaggatcatccggaggctacggtcacgatttatgagcgtgatgacaatatttcattcttatcatgtgggatctacctttatctcgggggaaaggtcaatcacttggaggatatgttctattcgtcaccagaaacgttagccaagttgggggcaatggttagaaccaaacataacgtgttaaaaattgacgcccagtcgaagaccttacaagtggttgacatgactactggaaaagtgtttggcgatacttatgataaattgattatgacgactggttcaaatgttgcggtcccgccgatttttggaatcgatgagtctaaggtcctattatgcaagacctacagccaagcacaggaaatttaccaaacagcccaagacaatcagcggatcgcaatcattggggcgggttatattggaaccgaattatctgaaagttatgcgaatacacatcatgaagtaacgttattccaatcgcatgatcaaattttgaataattacattagtaaagaaatttcagaccaagcagttcagctattaaaagatcatggcgtgaacgtgctattgaatcaccaagtaactgcctttactggtaatgatgatggtgaacttgtcattgaaaccaatcaaggcgattttaatgctgatttagcaattgtcggaactgggtttgttcccaatacggaactgttacgcggtcaagttgagatggataagcacggtgccattatcatcaatgattacgttcagacctctgacccagatatttacgctgctggtgattcttgtgtcgttaacttcaatccaactggacgttcggcttatacgccattagcaaccaatgcggttcggcagggtgcgttagcgggggccaatgtttttggtaaccagcaacgatatatggggactcaagcgacatcggccatgcaactcttcgatcacacgctggcaaccacggggttaacactggcaatggcgaaattgaatcatattccagctgaacgggtgacttatgagggcaactggcgaccagcttacatgccaagtacggcgaaactgatgattgaattaatttataatccggaaaatcgtaaaattctcggtgctcagttcttaagtgcgcatgaagtggcacagtctgctaatgcgttatcaatcgcgattcaaaatggaaacaccatcgatgatctagcatttgtggatatgttattctcacctaattttgatgaacccttcaattatctgaacctcgtcgcccaacaagcgattgaacaagaacgccaggcaggccgcaatcacccacgaattacggcctatggcgattgggccaagcaaaatgacaaggatttacaatagacgtccaggacgtctgcgttaccttgggtggctggtcgtgttagtgatgctgactgcagttgtcagtgggtgtcggaaacaaactacggttagtacaccacgacatgcgccaagtggatttgtaacgacgacggcctatgcgactaaggtgtcaaagcaacggcgggtaaaactagctgcatttattaaacgaggacttttgacgaagcaagggctttatacgaactatttagatacgcgtaaacggacgactgcaacggccactggtcatgaaatgttgagtgagtcatcggggatgtggctacagtacctggttacgactcgccaatggtcacaatttcggcaattctatcgccagacgaaagcgacctttaatgaaaacgggttgttcagttatcgttatgatccacgtaccaagaagcggtatgcggtcaacgctacgttggacgatttacggataatccgtgcgctacttacttatgatcaagcacatcatactaatcattatcgccagaaagccacgcaacgttatcagaatctggtcaatacaacaatcaaggatgggcacctggtcgattattacgatgttcatgcgcgtaaggaaactacgacgggcagtttagcttactttgatttacgaacacttaagtattttgaacaagatactaagaagggccggagtgcgtataagaagcaattgattgtccttaagggcggttatttaggtgatgtttttcccttgtatgcaaaaagttaccaatggaccactagccaatatagtgatggtaacctgaatacatcagaggctttggaaaccttattgcatttagcagaagttggtcacctaaaagcgactagtcggcgatggctgattcaacgggtcacccaccgtgatttagcaaacggttatacgacaaggggcacggtgagtgttggtggtgaatcagcggccaactatgcgttagcggcgtcgatctttgcgacgctgggtgatgaaaagcattatcaagttgcgatgaataatgtttggcgattgcaggtacagcaagacagttcgccgattaacggtggtattggggatgtcaaaaccaagcaagtgtattcatatagtaatttgacggcgctaaacgcagcgtttaattagagattgaggtaatctttgtgactaagttaaaacaacaattttggcgcgcaacgcggctgtttcaacagctaatgccacccccactactcgcaactttactttgtgctggtttggctgcttatgtggcatttgtaccgcccattaacggactggctgataatggcgatttttatcgggcgatgtataccaatggtatttataagttgctgggaacgcactacaactattttgattttgtaacgcagaaatttggcttgatgaagtactacaacgactatcgatcggtgaacttttcatctcagcccttatttgtgaaagtggctatcggtctcaataaattattttatagtaagacggtatttgatatccggtttatgggtattgtgaatgtgattccttatctgggtggcatttatttattgacggatgctttgacgtatcctgccaagcgttttcgaaattatctgattgcgggattagtcgttctagtatttggtgattcttcatttacattgtatttaaattctttttttgctgagccccaaatgttaggactaactttaatctcattttcagccgtcttactgctagcgcgacaacgatatcggcggcggtggccactcgttgcattgtattttgtttgtacagttctattgataactaacaagtcacaaaacgccccgctagcattgagctttgtggtcgtgacgattgggttactatttttgccacactttaacgcaatgcgtgtgtacttgcttgcgggaatggtcatgatcttgatcacgggtggactgacctataaattgatcggtcaagactttgtggatatcaatacctatcagactttttcgcacggcatcttgacccaaaccgatgatcctagtaaggatcttgctcagaatgggattgatgagcagtatgccttaatgcagtcacaagactactacgctaaacagtttgcgacgattcaagcttctggttcttatgttaagaaaaacttggtttctaagctgggagttggttgggtattaaagtattatgcgactcatctgaagcagtttggcaaattgatggatcttgccgccgccgatgtcatgattactcaagttaaagcggttggggattacacccaagcgtcaggagcacccgcaggaaaacaactaacattctttacaacgtatagtcagattgccggggctttttttccacaaaagtttgcctttaattgtcttctagtagttgcgttagtgatggtttatctggttggtttttataatgatttgcgtcagcagcgaatcgaaggcgtcttgcggtttttcttagtattaggttttttgtcgatttttatttttgtgccaattatttcaatcattggtgatggtgatgcagacttagcaaaacatttatttatggttccggttagcattgatctaattgtcttgctgtttatttcggataccttaaatcaccgtttgtggcatgcctatcgagaggaggaccaagatgcataagcggttatggcagttggtaatcatgggtgtcattatactttgtagctggttattgccgacagagatccacgctcaaacatcagcaacacacgttatgctggtttatgattcgcggaatgtggccaataatgatcaaaccaaaatcgcgatgattcaacgaatcctgaccggtctacacattagcatcaaaacggtggcggccgaagattatcatgctggcgaactacgacactatcaaggcgttattacgctaattaactggccgcagactaagctcaacaatgcagcgtttatcaaggatcgtaagcagttcagcggtacgaagctgcatattggcacaaatctgaccgctattgaggcccaacaattgaatgcccaaccggtcaaagtttaccaacaacagttctttcttcagagcaatgatcaacaagttcgccaattattaccatttatgagcagtatgacggcactcacaaagttacccgctaaggccaaaacaatcggctatttgagggcacaatcatcgctaaaacatgaatatccttatggaaccatcgttggtcgatacggttatctaccttatctttcaactggaggttatagtttagtgttagctactcagacaatggcaacattattcggtacccgtagtcattatcaaccattgttaacgattactaaggtaacgccgtattctaatcttaatttgttgaataaactcagtgcgaccttatatcaacaagggattccatttgcggttagcacaacaacggttggcactaatggcaaattcaaagcgtatcaacgctttgccaaagttttacggttaatcgaaaaccgtggtggggttattttcttaaaaacacctgtcgttggtggtgttacggcaagtagcggtcctggactgagcaagttgatggacagttacgtcattcagttagcacagaatcaggtttatccagttggaattagtgcttccgcttattggaaccaggacagggtctaccgccagaacgctttaactaaggcgaatcaggttctcttattacccgatcctaaggtgacgacttatgcccatcaagataatcaaggaacggtatttgatcaggccttttatggggttagtgctaaatcctttgaaacgctgaaatctggtgatcagctcagtaagttagcgctgaattttgccattcccaccgcacttacaatgactatgccagatagtgaaacgagtttacacaatttgactagacaactcagccgaatgaactatcagtggtttgaccctgcacaacaaatgacaacgacgatgctcaagagtggaacagcgacgatcagttatcggcgtggaacgtatttgttaaacggtgcgcccatacaagtgactgataatgcgccagcgacgacaaccttggctgcagtaaaaccagcagaaagttggatgaatcggttctttaaaactcaggggagtgtgttattgattttcttttcggtgacattgggaatttttgttttgtttattgtgattggtcggcgggtttatttgaatatgtttaaacctaagtaggggacggcatcgttgctatcataacgggaggaattaatattagtattttagattattttctattcttggctgtattgtcgatttggggcattctagtcgtgaacgttgtcttaacgattgcgggctatgtgaattatttacaaaaggtgcgacgtcctgaacctcagttaccggtaaaggtaccctttgtctcaattatggtgcccgcgcataacgagggcattgtaatcgtcaaaacgttacagtcgttattgaattttgattatcccaaggatcgttatgaaattattattattaatgataattcggatgataattctgctgaattactggcggaagtgcagtcattgtatccacatcgaaacttgaaagtgatcaatactgataagactaatggtggtaagggaaagtcgaatgcgcttaatattggccttaaacaggcacgtggttcgttgatttcgatttatgatgcggataatacacctcaaagaacggcattacggtatttggtggctgagttaatgagtgatcaacggctagcggcagtgattggtaaatttcgtacgcggaacaagaatgcatcaatactgacgcgctttatcaatattgagacgctatcatttcagtggatggctcaggcgggccgggaaaagttgtttaaattatgcacgatcccggggaccaattatgttattcggcgagatattcttgagaaaattggtggttgggatgttaaagcactggcggaagatacggaaatcagttttcgcgtttatcgaatgggatatcggattcgctttcaacccctagccgttacctgggaacaagaaccccaaactttagatgtgtggtttcatcaacggacacggtgggtcaaaggcaatatttatgtcattttaaaaaacgcacggctacttttcactaaaacggggcggccaattcgatttgacttgttgtactttctatcgatttactttttattaatgacgtcgctgattttgtcagatagtatgttcgtcctttcagtagctggaatcgcacactccgacttggtagggttcagcaatatactatggctaatggccatcatcacatttgtaatcagtacgttcgtgacaattacaacggaaaaaggggaaatgacgattgccaatttaatgattattgtttttatgtacttagtctatagtcagatgtggctggcagtggctgcacatggaatggtggggtatgttcgtgaacaagtttttcatcaacaagcaaagtggtataaaaccaaacggtatcagtaagtggttcttctggttaataggcatgctcgctttattaattgggatgagtagtaatctaagctgtcctatcagtgggcaggcagcgaataatctacaaacttatacgcaaccttttcaaaactcaacaacgacactgtctggtgatgcagttgaggccaatatgtattttattaaaatggattattggcaagtcaaaaaagtgacgattaatctaaatttccaaatttcgcagttggccaatcgggagacatctgacattacgttgtcgttgaacggaacgaagttttactcattccggcccaaaaaggagactggactccaaactagggctatcgaagtcccactgcggttaattcaaggtgaaaatcagttaaagatcagtgggcagatcctgaataaaaaaggccagcaaagttctcaattggtgcagacacctgccaactggttgacgatttacaatggggcgaatgctaactttgagtatcgcttgcaacccccaacaacggctattaaatctttttatgcgcatttttctgggactgataccatcgcgaatgctaattcagtcataacgctgccacatcaagcatcaaacgcagagttgtcagctggcatgtatgcgttaacgggtgaggcgcggaccattaccacagagaatacacagattccggtaacaacggcagataccgcggtggctaaacaggctgattatcagttggtcattgcgacttatcagcatttgcctaaagtgtttcagcagcaacttgatcgtcagcgactgcgagaacatgcagttatcaagacatatacgcatgatggtaaacattatttaattgtgagtgccttcaataccaaattattgcagaaggcaagccggtttattgctaatcaggaattaatgcaggaaacagtagcagatacgaaatacatcagtaacagcacacagacgtttacctctgagctacaatacggtggcaaaaagcaattgacgaccagcgatgattatttgactggcgctaaacatcagtcaagtacttattttgttagtctccctgttgatcggaccaatgctgatggttcgaaaatccggattcattttcgctatgctaagaacctggattttaaacgatcgcttgtaacggtttatgtaaatgattccgctttaggtagtaaaagactcacagcagcgcgtgccaataatgatgagttgaccgttagtctgccgaaaggaaaagcgctagggcatagtttcacgattcgtgtcgcctttgatcttgagatgagtggggcggctcaaagtgataatgcccaaacaccgtgggcgctgattaaggctgattctgaagcgacgattaagtcaaagccagtcgcagctttattatttacgaattatccatatttgtttttgaagaatgcgacctttaaccacattgcagttgttcgaccacgaacgctgactagtgacgattttcaaacgctaactaatatatttaatcttattggaacttatgcgcaaagtaatactggcaatattcagttttatacccatcagcctagtaaaacggtactcaaaaatagcaacgtaattgcgtttgggacgccagctcaaaacgcgtttattcggtctctgaattctaagctgtattttaaatataatcgacattttactgggttcctgtcaaatgagaaacttagtattgagaaaacgtatggtcaaaatattggcactgcccagctgttacgctcaccgtataatcagcgagcgggattgctagttgtaaccgccgcgaagagtagtgatgtctaccgggcgtctactcaaatcaattttcaacggaacattgcccagtatcaaggtgatgcgattgtcgtcgatcacgataataatcattataattatcgttttaagaagcataagacagttaatgatggcgtgaacgccaaaacagttattcagaagaattctaagctagtgatttatttaggtattgcgttgctaatcgtggtgatcattttactggcaggattcctgattatgcgtaaaagtggtttgttagagcgaaaggggcagcaccatgaatgatgatcaacgaacatctatttttgctgacgtttatttgttattatttttagcgcttattagcacgatggccgtactgatggcgttaacccctaatatcacacttaatacgatctatttaggtgtaacgatcattatgattttgatgacttattttttcggtgtggtcactggtctaatggctaacttactatttatctttgctcaggcaatcgtcatgatttatattaattcaacgcatcacgccgtaattccaatgatgatgattttttggttgattatgccgttgcttttgtcagctactttttatggcatgacccggcaattaatacaattgcaagcggccaatgccaagctacgagcagatattatgaaacgaggggcctttgacgaacaaaccaatttgcgaacaactgtcgcatatattcaagatgcacaagtgtttatcgaaacgaatcgacggtttcaattaccggttaccacggttattattcgggtgcgatactataatgaaattcgacggatgatgagtgaacaacaataccgtgatttattgcggttggtctcggatacgattacatcggcaacgcgagataacgatattacctattcccttgatcagaataatccaacgtgggccatcttgttattttcagaccaaccaggcgctcaaattgcagcgaaccgcattaaatctaattttgaaaaaaatttacaacgctcaaccagcctaaattcattagaaatcttattggtggttggtatcgcgagttgggatgcggaaaagatgaagagcccgtatgattttatgaatactggcattaaagaaactgagtatgatgtggcgcgttgatttcggttgtgtacaaacaagatagtcgacaaatgtaaattttgggggtatattaagcgtcataggaatttaagtggaaggggtctttagaaatggcaaagagttacgacgtgattattattggtgcggggcctgccggcatgacagccgccctctatgcttcacgagccaatctatcagtgctactattagatcgcggaatctatggtggacaaatgaataataccgccgcaattgaaaattatccgggcttcaaatctgttttggggccggatttggctaaagacatgtatgaatcagcgacccagtttggtgctgaatacgcgtatggtagcgtcgaatccgttgaagatcgtggcgatgttaaaattgtgacgacggatagcgatacgtttgagactaaggcccttgtcattgggactggttctgaatatcgtaagctgggtgttactggcgaggatacgtatggtggccgcggtgtctcatactgcgcagtttgtgatggagcgtttttccgtaacaagcatgtagttgtcgttggtggcggtgactcagcgattgaggaaggcacttacctgacacagcttgctgataaggtgacggttattcatcgtcgtgaccaattgcgggcacaacaaatcttacaagatcgggcttttgctaatccaaagatggaatttgtttggaatagcaacgtgacggaaatcatcggtgatgataagaaggtcacgggagttaaggttaataataataagactggtgaagacagtgagattgcggtcgatggtgtctttatctatgttggtattaacccaattacgaagccattcagtaatcttgggattactgacgaaaacggctggatcgaaactaatgaccacatggaaaccaaggtccctggtatttttgcagtcggtgatgttcgtaagaaagatttacgccaagttgcgacggcggttggtgaaggcggaactgccggtcaaggcgtttacacttatatcactgctttaggcgacaaagttaacaattaaataaaattaaaaaatgcgtagctgatttaattgagatcagccacgcattttttattggtaaatatagcgttagtcattgtttgacgatgaccaaaggttcgcgaattagtgttgatagggaaatagaagcaattgcttgttagtatacgttgccaggtaaatatcactgacagtatagtgctgggcctgcaattgggtcagtaaccaggcttcatcatgattactagtttcaagcgcatcgaggttgacctgaccatcgacgattattggatacttgacggcgtcgtcgcccacttgggtaatcgtcagttggccgttttgttcaagtacggcccgtttgacgtagcgaatatccgtgataccttccgtacgcaagcgaaacatcagatcgttagcactcatcccatttttgagggccgtgctgacgagtaattgcccatttttaatcaatagctgtggctgtccatcaatcaaacgtttcacgtagcgattgtgatgtgttaggaatcgcaggaccagcactagcagtgtccagatgagaagcactaaaatgtattgtaaaacagtaacgctggtactataaatcatgcccccaacgattgcaccgagaacgtagttttgaacttggtcgagggcgctgattggcgcaaggttacttttaccagatagattgatttgtagaatgatggtcaatagcccgagggccagtttgatcgtcacatcccagtatgaaaacatttattgcccctccttaacataattgattgttgattgaatcggtgtggctttagtcagggtataactgtttccatccgtattgatcgtcacgttatagatatggtcatggactttaatgagcatcccactgctgacagaacttgtattagaccagaccgcggttttacgaacccctttttctttggcgacacgctgcataatttgtgtcacttgtgatttttggttgaaactatttttgattgtctgccattcattaaattgaatgccgacgagcagcaataataataaaaccatgataatgaataagtcgcggtattttaggtctgttttatggcggtaccataaccagctgagtatggcgattattaatataatgatgccgatggctgcgagttggacaagagtatgattgttattttgatggactaagtagttgtatgaataaaaagtcatgatggcctccttataagatttattatagcaagttttgatagtgactgaactaactagcacttcagaatttatgggtattcgcactgatgcgggcccactacgcatttaaaatgcattaattaatggattttcttagtaaattttactttgtaaagtgtgtcaatgttgtatactatttttgtaagcactaacaaatatcggaattggagatggtttttgtgagttggcaggatacttataatacctggaaaaaccaagcgacacttgaaactagtttaaaacaagaattgacgggcatggctggcgatgacgccgccttagaagacgccttttatgaaccaatggaattcggaaccgcggggatgcggggggtacttggacctggtatcaaccggatgaatatttatacggttcgtcaagcaacggaagggttagcacgcttcatggataccttgcctgctgaggttaaggaacgcggggtagcaatcagttttgattcccgccatcattcagaagattttgcgcatgaatctgcgcgagtattgggccaacatggtatcaagtcatacgtttttgaaagcttgcggccaaccccagaactttcatttaccgttcggcatctgcatacttacgcagggatcatgattacggcgagccataatccgaagcaatataatggctacaagatttatggcgaagatggtggtcaaatgccacctaaggaatctgatcttatcacatcatatattcgtaaagttgacgatgtctttgcgattgccgtcgctgatgaacaacaattattagctgataagacggaaaccattattggggatgatgtcgatcaggactacttagctaaggtcaaagaagtgacgatcaatcaaaaactagtggatgaagtcggtaaggacatgaagttagtcttcacaccattacatgggactggccggatgcttggcgaaaaggctttgaagaatgccgggtttaaaaacttcagtgttgttaaggaacaagctgtggctgaccctgaattctcgacggttaaattccctaatcctgaatttcctgaagcctttaagatggccattgatttgggtaaaaaagaaggtgcggatgtcttgattgcggttgatcctgatgctgaccggttagggacagctgttcgtcaacctaatggtgagtatgttctgttgacgggtaatcaaattgccgctgtcttgttacactacatcttgcaagcaaacaaggatgccgggacgttaccgaccaatgcggccgcagttaagtcaattgtttcaagtgaatttgctactaaagtagcggcttcatatggtgtcacgatgatcaatgtcttgaccggtttcaagtatattgctgaacaaatcgaacattttgaagccactggcgaacatacctatatgtttggttttgaagaaagttacggttacttaatcaaaccatttgttcatgacaaggatgcgattcaaaccacagtgcttttagccgaagtagcggcttattataagcaacaaggtaagaacctttatgatggattacaagacttgtttaaggaatacggttacttccgcgaacaaaccacgtccgaagaatttgatggcgttggcggcagcgataagattgcggctctgatgactaagttccgaagcgaagcaccaactgcctttgccggctacgatgtcactgggactgaagacttccagagtcaaacggaaagctttgctgatggccacacggcaccaattgctttgccaaaggcgaatgtcttgaagtatcatttaaatgatggcacttggatcgccattcggccatctggtacggaaccaaagatcaagttctacattggaacgctaggtagtacgttagaagaagctaatgataagttagcgaaatttgaagatgccattcaagcgtttattaaagaataaattggttatttagtcagaagttgtacggcccagctgactagccatgctaagtgataaataacgccttacgaaattttaagttaatttcgtaaggcgttatttagttgttgttcatattagaaattaattcattgtcggatattcaaagttgacggggtcaccgggtaggcgtaataattgcggtttgccatagtaatagccttgtcgaagattaatatcgaagtgactactcaagcgatcatcttcggcgtcttcaatcccctctaagattaaacgcaatccgtattcactactgatggcccgccaaaaatggagcttttgctgaatcttaggatctttgatatcactgcggaagttttgcaacgcaaattttaattcagaagctaatggcaaaatttcttggatactcttgaaatcgttaattccggtaccaacatcatcaagtgaaatttgcataccatgttcgatgaacccccgtaagtgtgggattaacatggtatctggataatccttaggactacgttcctcagttagctcaacgactaatttagcaggatagagctgaacctgactttgaataatggccttcgcaaccgttgtatccatcaattgttcgcgactgatgttgactgcacaataacgaacttttagtccaagaattttagttgttgcaatgagcagatcagaggtaacttgtgaactaattgcggcaaaggattcaggcagacgccagccgtctggggttagttgtttgattagtagttcgtatccgtaaactgtattgttgagtaagttaagttgaggttgtacaaaatagcggtaaattggttccataagtaccatcgccttttataataagtttaaaatcattgaatcgttttaatatcaaccgaatcgctgtatactctaagtatacgtcaacttaaataaatgtttaacttaatccaagttaaattttaacttttaatgaaagctgtggtcgaaacaatgaaagttgccattattggctgtacacatgcggggattgccgccatgaaacaaatcttgaaatattatccgggcactgaaattaccgtctatgaacggcacgcggatatttcatatatgtcttgtgggacttatctacacttagggggtaccatccataatttggatcaagcgttgtacgctaatcctagtgaatttagtgaacaaggtgtgcagatgcggatgcagtatgatgtgatcaatgtgaatgctgataagcatacaattttggctcaaaatttacagacaaaagaattacaaacggatcactatgataagttagtcatggcgacgggttcaatcactgcaatcccggctattccgggcgtagagaatcctaaggtcatgctttgcaaaacatgtgaacaggcccagcaactctacgaagcagctaaacatgcacaccatattgcaatcgttggtggtggctattcgggggtggaacttgctgaggggtacgtgaagtctggacacactgtgacgttgtttcaacggggcccccacttaattaatgagtatcttgatccacaaatttctgagaagatcgaagacttgttaacgacgaaaggcatccaagttagaaccaatgcacaagtgacggcttttagtgatacggctgataatcgactacgagttgcaaccgctgatagtgaagaaatatttgatatggctgttatttgtccgggggtgattccacaatcagagttattggcgggacaggtcaaccgaacgaagcagggggccattgtaacggaccgttatatgggaacctccaacccggatatatttgcggctggcgatgtgacggaagttaactttaatcctacgaaggaacacgcctatatgccattagtctcacatgcaattcggcaaggtgcactggcaggaattaatatctttgataaacgcttaggtgcaattggtacgcaagcgacgactgggatgttgatttttgatcagaccgtggcttgtgcaggtctgaccttaacggcggccaaagcagctaacttcgatgcccaagcagctttttatgaaggcaattatcggccggactttatgcctaccacggcgaaagtcatgattgagttggtttatgatcaacaaacgcggaaggttttgggtggtcaactaatgagtgctcatgaagtttcacaatcagcaaatacgttgtccgtagtgattcataatggtaatacgattgatgaattagccttcatggatatgctattctcacccaactttgatgaaccgtttaattacttgaatttagtagcgcaggctgcagtagatcaggaacatggctatcgtcggaataattaagtttttgcactaattatgttcagaaggtgctggttgttaaaatcaagaacagccagcttagacccgctggaataagttcagattagcgtaaacttgtttggggagtgtgtctgataccgttcttcaggtattgctgccaatcgctgggatggtattcaaaacgaatgtgctatgttaacgtttgttccaagtctaacggagtagatggttcagcgacagattagcttgggttaagcggccgttcatctgccactcgagtggtttcctggaagtcagacgaggacgcgcatatgctgacgggcaacaatccaactaactagcatgttttaataataagtgctggtgaatccataaaaataatgagccaaataaggtgaccgccaaacagtgggtttcataacctgactgtttggcggccacctttatattatttgaaagcgattggtcaagcatagtcgttgggatcggcggctaggggttggtaagcgtccatttcggtgtcgcggtagtcccaccattcgttaacgtagccgacaaagcccgcggcggtcatggcggtgtccagcagctgataatttttttcttgaagtgcggttcgaggagcgtcacggtgagcagctgccgtgaagtcatcgaaggcagttggcattgttaactcactaccatcaggatgggccagggtcaaatctaaggtgacgcctttttggtggctgaaattaggattaggctgggcaacaaattctggatcaggatacacttcaaataaacggcgctgggcgctgacgggccgataagcatcccagactttgagtcgataaccttgttgtttaaccagggcgcttgccttggcgagtttgtgggccgtgccagtgcgaacaatggccgtggtaaagtcgtaaatcacttgatgagtaaagttattagtggtggcataacgcaggtcaacgatgatttcggagtctaagtgttgaatattggtgaaaccagttaaagcttgatccatagtaggtcctccttagaatttagttatgcttattgtatctgattggccgatattttaccgactaaaagggttgcaaatggtgtcaaactttctgctagctttcaatccgggtccctgatatgatggaaagcggtgtaaatttaacaattgattgaagaggtgaggtcgcatggatcgacaaacacgacgcgcaattttaattttagtttttagtgagtttttagtttgtttagggattagtttagttattccagtcatgccgtttattaaaaatgaactgcatttaacggctaccgatatgggaataatgaatgcgctattcgcattggcacaatttgtggcctcacccattattggccgggtttcagacaaagttggtcgcaagcccgtattaacggtagggctagtcttatatatggtctcggaagtactatttgcgctaaccaaccagctgtgggtctttaatatttcccggattgttggtggcttatcagcagcgatggtcgttccgacggcgatggcgttagcatccgatattacgaccaaacgacagcgagctaaagtaattggctggttatcggcggcctttagtggtggcttgattttaggccccggtatcggtggggtattggctggtattagttataagacgccgttctgggttgctggtgcattgggattactcagtgccattgtgctcgtcattctgttgcctgcggatcgtcagattgatcctgatcgcgaagcaattacggccacgacaacgacgaccaatcatccgatgacgcgggcattttggaccgtcccgattattatattatttacgatgattttagtatcttcctttggcttacaggggtttgagagcatttatagtatttacgtgaatgaagtctttcactttagtctgagcaacattgcgttggtcttgactttaaatggtttgatttcgctcttcctacaggtggcactatttgatacctttgtccagcgttggggcgaacggcgggtcattcgggtgtgctttgcagctgcggcgctctgcactatctggattacgcaggctcattcgaaagttgctgtcatggttgcaacgctcgttattttttcggcattcgatcttttgcggcccgctattacgaccctattaacgaaagcaagtgaggccaaccaggggctaatcaatgggcttaacatgtccttaacgagtgttggcaatatcgttggcccaatcatgtcggggatgttactagatatgaattatcactatccatatctagtggtggccggattcttgattgtctcttatttaatggcgtttatgttacgattaccgaaccaggttcattcacatcagcaagtttaatattgcataacagttaagctaatcagcgaaagcgctccgggtttgcgtccccggggcgcttttgttacacttaggccaaattagattgaaggatggtgggctgcaatgggaatgcatcaatattttcagagcttaagtaatttagaaacgattcaacgggccccgggttttttcaagtatcagaatcattcagttgcggcgcattcattcaaagttgccgaagttgcccaatttttaggtgatgtggaagaaaatgccggaaaaattgttgattggcgagccctctatgagaaggcgctgaatcacgactataatgagcgttttatcggggatattaagacgcctgtcaagtacgcaacgccgacgctacggacgatgctggcggatgttgagcataaattatcacaaaattttgtgcaaaatgagattccggctgagtttcaggcagcttattcacggcgtctatcagaaggcaaggatgaaacgctagaaggccagatattgtcggtagccgataaaattgacctattgtatgagtcgtttggtgaaattcaaaagggtaatccagaaccagtttttagggatatttatcaagaaagtttaaaaacaattgtcgcgtttaaaaagatgactagtgttcaatatttcttaaaagcagtgctgccagagatgttagcggaaccgttcacgcatcaggatcaattacaggcgctgacgacccagattttaacggccgggccgcaatccgattaatggcgaaagtatgttcgatgtgctaaaattaaatgcgatttgaatgtgatagggaagcgcgggcttgcctattttttatggtgcgacagtaagatttagttatcaatagatgatatgaacgggtgaccgtttaaaaggaggactacgtttgattgatcgggtagataataatcattttgacttagtttcagattaccaaccaacgggcgatcaaccccaagcgatccagcaattaactgctggcattgaatcgggagaaaaagagcagatcttgttgggggcgaccgggaccgggaagacctttacaatttcgaacgtgattgcaaaggtgaataagccaacgttaatcttgtcacataacaagacgttagcgggtcaattatacggggagtttaagaagtttttcccgaacaatgccgttgaatattttgtgagttattacgattattatcagccggaagcgtacgtgccttcgagtgatacctatatcgaaaaggactcggcaatcaacgatgaaatcgataagttacggcactctgcgaccagctcattattggaacgcaacgatgtgatcgtcgtggcatcggtctccagtattttcggtttaggggatcctcacgagtaccaagatcacgtagtctcactgcgagtcggcatggagatcgaccgcaatgatctgttgcgtaaacttgttgatattcaatttgatcgtaacgatattgatttccagcgggggcgttttcgggtccatggtgatgtcgtagaaatctttccggcttcacgggatgaccacgcattgcgcgttgaattctttggcgatgagattgatcgaatccgtgagattgacgccttaaccggtgaaattgtagctgatcgtgaacatgttgcgatcttcccagcgacccactttatgacgaatgatgcgattatggaacacgccatcaagggcattgaagatgagttggatggccgcctgaaagaattgacagccgatggcaaattgttagaggcgcaacgactcaagcagcggacgacctatgatgtcgaaatgctcaaagaaatgggctacactagtggtatcgagaactattcacgttttatggatggccgtaaacctggcgaaccaccgtatacgttactggacttcttcccgaaggactttttgctcgtggtcgatgagtcacacgtgacgatgccccaagttcggggaatgtataatggggaccgagcacgtaaacaaatgctagtcgattatggcttccgtttgccaagtgcgttggacaaccggccattgaaacttgaagaagttgaacagcatattaatcaagtggtttatatgtccgcaacgccgggcccttacgaaatggatcggaccaagcatgtcgtccagcaaattattcgaccaactggtttattggatcctacgattgaggttcgaccgattatgggtcagatcgatgacttagtgggtgaaatcaataagcgcattgaggtcaacgaacgggtctttatcaccacgttgactaagaagatggcggaagatttgaccgactactttaaggatttaggcatcaaggtacggtacttgcacagtgatattaagacgttggaacgaacgcagatcatccgcgacctgcgtctgggcaagttcgatgtgttggtcgggatcaacttgttgcgggaaggaattgacgttcccgaagtttcactagttgcgattttggatgcggataaggaaggtttccttcgtaacgagcgttcgttgatccaaacgattggtcgggcggctcgtaatgagcacggttcagtgattatgtacgctgacaccacgactgattcgatgcaggccgcgatggatgagactgcacgtcgtcgtgccgtacagatgaagtacaatgaagatcatcacatcacgccacatacgattaagaaggccattccagagctaattgcttcgacgaagaccactgaagacgcgggcaagaaggatgacttcttagaaaccgactttgatgatatgacccgtgaacaacaattagatatgattagtaagttggaagaacagatgaagaccgccgctaagaagctcgactttgaacaagccgcaacgctgcgtgatacggtcatggaattgaaagcacaaattagctagcaggttgctggcttgagattgaggaggcctttttttggcaaatgataagattgtcattcacggtgcgcgagcccataatttaaaagatatcgacgttaccatcccgcgcgacaaattagtcgtgattacggggctgtctggctcaggtaagagttcgttagcgttcgataccttgtacgcggaaggacaacgtcgctacgtggaaagtttgtcagcgtacgcgcgtcaattcttaggacagatgcaaaaaccagacgttgattcaattgatgggcttagtccggctatttcgatcgatcagaaaacaacatccaaaaacccgcgctcaacggtcggaaccgttacagaaatcaatgattatttacggttactgtgggcccgagtcggtgaaccgatttgcccgaacgatgggacaccgattgcgagtcaaactgttgaacagatggttgatcggattcagaaattaccggaacgaacgaagttgcagattttatcaccaattgtccgccagaaaaagggcgagcacaaaaagatctttgaaaagatcaagcgtgaaggtttcgtgcgggtccgtgttgatggtgatattcatgatatcagtgaaacttttgaactgaacaagaatcaacaacacacgattgaaatcgtcattgatcggatcgttgtgaagtcaggtgaccgttctcggttatttgattcttttgaagcggcgttgcgattaagtgggggctatgcgattgcggatgtgatcggtggcgaacccattatgttctcagaacattatgcttgtcctatctgtgggtttactgtgggagaacttgaaccacgattattctcgtttaacgcgcctcagggagcttgtccagactgtgaaggtctcggaatcaagctagaagtcgatgaggaccttgtcgtacctgataagtcgctgacattggctgaaggtgcgttagcgccttggaatccaatcagttcacagtattatcctgaaatgttgaagcaagcttgtgaacagttagaaattccgatggatgtgccgtatgaagacttatcaaaagctgatcaacaaacggttttgtatgggtctaacggaaagacgttccatttccactaccagaacgactttggtggtgttcgcgatgttgacgctgtgtttgagggcgttatcaacaatgttgaccgccgctaccacgaaacgaatagtgatttcacccgcgatgtgatgcgaaagtatatgacggaactcacttgtcagacttgtcatgggttccgcttaaatcgcaaggccctgtctgtcaaagttggtggcgaacatatcgggatggtctctgacttagccattggtaaggaactcgatttctttaacgagttgagcttatcagaacaaagtctcgtgattgctaaaccaatcttgaaggaaatccgcgaccggttatcattcttgcaaaatgtgggactggcgtacttaacgctcagccgttctgcacggacgctgtctggtggggaagcccagcgaatccggttagcaacacagatcggatcgaacttgtccggcgtgctctatatcttggatgaaccatcaattggattgcatcagcgggataacgaccgcttgattggttcacttaagaagatgcgcgatctggggaatacgttgatcgtggtcgaacatgatgaagacacgatgcgggccgctgactatatcgtggatatcggcccgggtgccggtgaaaacggtggtgaggtcatggcggccggaacgcccaagcaagtggctcgctcgcggaagtcactgaccggccaatatctatcgggcaaacggtttatcccactacctgaaactcggcgtccgggtaatggtaagaagattcgtatcactggtgcggccgaaaacaacctcaagcaaattgacgttgattttccactaggcgaatttgtcgtggtaacgggggtttccggttctggtaagtcgaccttggttaacgatgttttgaaacgcgtattggcacagaagttgaatcgtaattctgaaaagcctggtaagtataagagtgtcagtggtattaagaatattgaacggttagttaatattgaccaaagtccaatcggccgaacaccacgcagtaatccggccacatatactggtgtctttgacaatattcgtgatttatttgcacaaacgaatgaagctaaattacgtggttacaagaagggccgctttagttttaatactaagggtggtcgttgtgaggcttgtcacggtgacgggattctaaaaattgaaatgaatttcttgcccgatgtctttgtaccttgtgaagtgtgtcatggtaagcaatacaattctgaaacgttggaagttgaatacaaaggcaaaaatattgccgatgttcttcaaatgaccgcttcagaagctgttaagttctttgaaccaattccaaagattcgacggaaactacagaccttggtcgacgttggtttgggctatgttaagttaggccaacccgccacgactttatcaggtggagaagcccaacggatgaagttagcttccgaattgcacaaacaacagtcggggaagaatttctacatcttggacgaaccaacgactgggttgcacagtgaagatattcggcgcttgattggtgtcttggatcggttggtggatgcgggtaataccgtgttaatcatcgagcataatttggatgttgtgaagtcggcggattatttgattgacttgggcccagaaggcggtgacggcggcggaacaatcgttgctactgggacaccagaacaggtcgctgaagtggctgaaagttatactggccaatacttgaagcccgttctagaacgggatcgagcacgtgaagcaactgcacctgctaaataacgggcaatgtgctacacttgagtttgtaatgtaattttaatttagaggagttgtttgtacatggctaaagtagaaagttttacattagatcataccaaggttttagcaccttacgttcgtaaaattacggtggaaaatgggcctaagggtgatgccatcactaattttgatttgcggttagttcaacctaacaagaccgctattgatacggcgggcttacacacgattgaacatatgttggctggattattacgtgatcggatggatggcgtgattgactgctcaccatttggttgtcggactggttttcatttgattacttggggtgaacatgacaccgttgaagttgctaaggcattgaagtcctcattagaattcattgctggcccagctaagtgggaagacgtacaagggacgaccatcgatagctgtgggaattacaaggatcattctttattctcagctaaggaatgggccaagttgattttatcgcaaggaatttcatcggatccatttgtacgcaaagtcgttgaatagaccaaaatataaaaagtaatggtggtgccggccaccaattaaaaagagcctagcttttcataacgaaaagctaggctctttttgctgtttactgacattgtgcgagcttagcggtcctgaatcgtgggaaaacaatctaagattagattaaggtagtgtttcaaaaataacaaaaaatatactgatattggtgaatatctgcataaaaattctatattttagtgaatattgcgcaaataatgaatatatttaaaatattattgaataaagttaaattgggtggtacgatactgtcattgataaaagcaaagataaaaatttcggaggtacaaatcaatggtcaaacaaaatgataaaattattctcgcttattctggtggtttagatacgtcggtcgcaattagttggttgaaggataagggctatgatgttgtggcctgcggaattgatgttggtgaaggcaaggacatggatgcaatcaaagaaaaggccctaaaattaggggctgtttcatcatatatgattgatgctaagcaagaatttgctgaagaatatgcgttaattgctttacaaggtcataccttgtatgaaggtgaatacccgctggtttcagcactttcacgtcctttaattgctaagaagttagtcacattagccaagcaagagcacgctgttgcaattgcccatggctgtactgggaagggtaatgatcaggttcggtttgaggttgccatccacgctcttgcaccggatatcaagatcgaagcgcctgtacgtgattggcactggtcacgggaagaagagatcgattacgctaaggaacacaatattcccgtaccaatcaatttggacagtccttactcgattgacgaaaacttatggggccgggctaatgaatgtggcattctagaagatccatggcagggcgcgcctgccgatgcgtttgaccggacgaaggccttagctgatacgccggatacgccaacgactttggaaatcacttttgaggctggggtgccagttgctttagatggtgaatcacttaacctagctgatttaatcatcaagttggatcagattgctggtgaacatggaattggtcggatcgaccatattgaaaaccggttggtcggtatcaagtcacgggaagtttacgaagcaccagctgcaacggtattgctcaaagcacataaagatttggaagatttgacgtttgagcgtgagttagctcacttcaagccaatcattgaacaaaagcttgcggatacgatctacaacggtctttggttctcaccattgatggaagcgatggttgccttcttaaagcaaactcagcaagtcgtcaatggggtagttcgggtacaactcttcaagggtaacgttattactgaggggcggaagtcacccaactcactatatgatacgaacttggcaacctatacatcagcggattcatttgaccaacaagcggcagttggtttcattaagctatggggcctaccaacgcaagttaatgcccaagtccaagcgaaggctcaggctgaagctaagactgataaggcacacgcctaatgagtacccagaagctatggggtggccggtttaccgaaacgggtgctaagtatgttgatgactttggggcatcaattagctttgaccagttgcttgccgcagaagatattgctggttcactggcacacgttaaaatgttgaagaaaactggtattttgcccgccgctgatgttgatcaaattgttgctggattggaaaccttggctgagcgtcaaaaacaaggtaagttggaattttcaacggtcaacgaagacattcatatgaatattgagtcattattgaccgaagagattgggccggtcgctgggaagttgcacacggcccggtcgcggaatgaccaagttgccacggatttccacttgtacttgaagcatcaattaccactaatattggaccggctacatgaactggaaacagtattggtcgataaagcgagtgaaaacgtggagacggtcatgccggggtacacgcatttgcaacacgcccaacccatctcgtacgcgcactacctgttagcttattaccaaatgttcaagcgggacatggaacgcttcgagtttaacctgaagcataccgatatttcgccattgggagccgctgcacttgctggaacgacttttccaatcgaccgggaatatagtgcgaaactattaggattcagtgaagtctatcataatagtttggatgccgtttctgaccgggacttcgtgcttgagtttctcagcaatgcttcgatcctgatgatgcatctctcacggttttgtgaagaaattgtcagctggagcagttatgaattcaagtacatcagtttgagcgatcagttttcaacgggtagttcgattatgccgcaaaagaagaaccctgacatggccgaattgattcggggcaagtccggccgggtttacggcaacttgatgggattgctaactgtcatgaaagggattccgctcgcttacaataaggatctgcaagaagacaaagaaggggcgtttgatacggtcacgaccgtgttaacgagtctccacgtcttcaccggcatgttggcaacgctgaccgttaatgaagatcggatggctgatgccacgactaacgatttctcaaatgcgaccgaactagccgattaccttgcaaacaaaggaatcccatttcgggaggcccatgccattgcggggaagctcgtcttggatggcttgaaaaaacagcggccgttgcaggatattccactcaaagaatatcagtcaatctcaccgctgatccaagaagatgtctaccatgatttgaacgcaaaagttgcggtggaacggcggcattcgctaggtggtactggttttgatcagattagacaagaattgcaacgggcacaaacgcaattgtcagcctatcaatctgaaaccactgattaattaatgcttatcaatttgaccattgatattatttttaaagatgacctctaagtggcggagactcggcatttagaggccatttttaatgctattgacattttgaaaaagcattaagctaacataaagtctatcagaaaaattggaaactcttacattaactggtaagatggaattaatatcggatatgggagatgttgatgtatgtttaatgatcatcgctgggggtttgattggactgaattcatgacggggatcgttttcttgatcgccgcttactttgtcatcaagcaaccacaagcagcacttttaagtttagtctttttatttgccatcgccgcaattattagcggggtcaccacaatcggtgggtacacaaaactacgccgtgaaacagggttgcgggcaaactttgcccttgtgtttgcgattattgatattttagtggggttattatttttattccacgcaccgactggggtactggtactcggttacgtctttgccttttggttcttgatcgattcgattgaacggctgaccgtagtctcacatctacgcgtctttggaaccgggtattttgttctatctttaatcttggatattattagtttggcattgggaatcttattagtaatcaatccaatggttgctgtgattagtttcaacgtactggttagtttctactttgcagtttttggcatcaacgcaatcttgattgcttttgctcggcgtaactagcttggcagtattgactcgttagcgatacttggcgctcactattggtggtgtcagggtgttgttaaggggtcttttttttgcgcgttaatgtaatactgtttggaatcaaatggcgggtcgaagtggcacgtcagtagaaatgacacacccggtgtgttatactaccaacaatatggactagagggggccaatacagcatggcagaatcattacaactagtaattatttctgggatgagcggtgccggtaagacggttgcggttcaaagctttgaagacctgggctatttttgcattgacaatatgccaccagcgttattaccgaagttctcagaattagttgaggagtcgggtaaaataaagaaagtagcgttagtgattgatttacgctcgcgggctttttacgacgaaattatggatatgttggctaacttagacaacacggactttgtgtcgacccggattctgtttttagatgcttccaacgaagaattagtgtcacgttataaagagacgcggcgttcccatccattagccatggaaggtcgcgtcatggatggcgtgcgcaaagaacgagaattattggcgccattgaaagatcgggcttcatacgtcattgatacgtcgacgttgacaccacgtgaattacgcgaatcgatttttgataaattcgaaacggatcaggatgagacttttcatattgaaatgctatcattcggttttaaatacggactcccgattgatgcagatatcgttatggatgtgcgcttcttgcctaatccatactacattcctgaattaaagaagctgacgggactagataaacctgtggcggattacgttatgcagcaaccagctacggaagctttctaccagcagttcttgagtatgctggaaagcattatgcccggctatgaagccgagggcaagagtagtttgacgattgcgattggctgtacgggcggtcaacaccggtccgttgccttgacgcaacgtatcggtgaagcgctggctaagcactacaaggtgcacatcagtcatcgtgatattgagaaacgaaaggaaactgttaatcgctcatgagaaaatacacatttaagacccagcggcctaaaattgtggtgattggtggagggaccggtttgccggttgttctgaacggcttgcgtaagcaggcagtcgatattaccgcagtggtgacggtggctgatgatggtgggtcatccggcattattcgcaattacgttaacgtggttccacctggtgatattcgtaatgtaatggtggcgttgtcgagttggccggatttgtataaagatatttttcagtatcgtttccagggtgatgatcaattttttgcaggtcatgcgattggtaatttaattattgcggcactaacggaaatgaaatctggggtgtttgacgcggtgcaggaattatcaaatatgatgcaagtagatggtcatgtttacccggcagccaacgaggcactcacgctacatggtaagtttagtgacggtaccgagttagtaggtgaagccgaaattaccgcggcccataagtcattggaatgcgtttgggtcactgacaagaatggtaaggaaccacaagcagttcaaccagttattgatgcgattatggcggcagatcagattgttttggggcccggtagtttgtttaccagtattctaccgaacctaacgattggaaatattggtcgggccgtctgtgagtctgatgcagaagtggtttatatttgtaatattatgactcaaaaaggtgaaacggataatttctccgatgctgatcatgtacgggtcttaaaccgccatttggggcagaactttattaatacggtgttagttaacaccgaaaaagtgccagaagattacatggattttcataagtttaacgaagtttcaaagcaagtgagtcatgacttccgggggttacgtgaacaaaactgtcgcgtaatctcatcgaacttcttgaaactccgtgataatggggcctttcatgatggcgaccaagttgtcgctgaattaatgaatctagtcggtcattccgacgttttcagataagggggtcgtggcatgtcatacgccagtgacgttaagaaagaattgactaacctcgctgtccatcgcgagaatgctaaggctgaattaatggctttgattcgaatgaatggggcgatcagcattgctaatcatcacttcattttgaatattcagacggaaaatccggccatcgcgcggcgtatttaccggctactcaaacaattttatgacgtcgatagtgaattgattgttcggcgcaaaatgaaattaaataagaataatttgtacatcgtacgattgaagaccggtacggacatggtactcgctgatttgggtatcttaaaggattatcaaatcgttgaagtggcaccaactgaagtgttaacggatgatgctgcggtgcgttcttatttgcgtggcgcctttttagcgggcggttcggttaataatcctgaaacttcccggtatcatttggaaatttactcactgtatgaggaacataatcatatgatctccgagatgatgaatcagtatggcttgaattcacgaacgactgatcggcgtggtggttttattacgtacatcaaggaagcggaaaaaattgccgacttcttgtcattggttggtgcgaccaatgccatgcttaagtttgaagatattcgaatcatgcgggacatgcgtaactcggtcaatcggttggttaactgtgagaacgccaacatggataaggttgccaatgcctctagcaaacagattgaaaatattttattgatcgatgctacggtgggattacaacagttaccaccaaaattacaagaagtcgctgttgcccggttggaacatcgtgaagttagcctcaaggaactaggaacccttgttccgggcgggccgatttctaagtctggaatcaatcatcggctgcgtaaaatcaatcaatttgcggaacaattacaaaaagatgcttagttgtcgataaggatggcttaagcatgagttttgttgaaaagcttgctaaccattttagatggtgttagcggcttttttgggttgaaatggattgattgtcgttcgccatactcgaaaagcacttgacaaaagtaagtgcaactatttatactgaacacatcttattgaaatcggagagacgtaattatgcaaaaatcaacaatgcaaatgatgatgtgctgcccatgttgtgaatcaaacaacatggctatttgcgttgaattacaagcgtctctgcatcaaaaataacgggattgagctcaaatcgttaattttgaaacgcctgcttggaatctgacgagattctgaacaggcgttttttgttacaaccgatgggaataagtagatcaacacatcaaaatgggaatgtaaaggggcgagaagtttgaagaagcgatcagtgttagcagtggtaatgagcctagtattagtgacggtgctggctgcgtgtgggaagcacaatagccagtcttctggtaatggcaagtatgcaagtagtcaggttttaaacttgtcgtaccctagttcattggattcaatcgatatttccaatatgtcgggatatggcagtacgggtaatatttttgaaagcttataccggttaggaaagaatggtagcattacaccgggattagctaagtccactaaggtttcaaaggatggcaagacgtatacctttacgattcgcaatgcgaagtggagcgatggttcgaagataaccgcgcaagactttgtctattcttggaaacggaccgtcaccccagcaactaagtcacagtatgcctacctcttctcaggggtgaagaatgcggatgaaattgtcgctgggaaaaagtcaccaagtacattgggcgtcaaggcgcaaggcgaacatacttttattgtgactcttgacaagccaattacttattttaagaagttaatgacctacccgttgtttggaccaattagtgagaaagcggtcaaaaaatggggtagcaaatatgccactaaggctcagtacatgctctacagtgggccgtttaagttgactggctggactggaactaataatagctggcagtttgtaaaaaataatcagtactgggataagaaagctgtccacctacaaaagatcaactacacggtcaatgagagtactacgacaacattgaacttgttccaagaaaagaaacttgatctaacgcaattagcgagtgaacaagttaagaatatgaagagcagttctgactataccacgtacccttattctatcaccgcgtttctggtttataatttccaagacagtaatgcgacaatcaaaaaggcgctcaataacgctaagattcgtcaagcaatttcattgtcgatcaatcgcaagacgttagtaaagaatgtgattggtgacgcatcaacggtctcaaagacgtttgttcctcaggatttagttaaagacgctaaaactggtaaggattttgcagatgaatcaacggttaagaattcaacgtcatataacaaagcgctggcacaaaagttatggaaacaaggccttaaggaaacgggaattaagaaattgtccattcagttattagcttctaatgacgaacctaataagccgatttcacaatacttgaaatcagcattagaaaagaatctcgatggtttgacggtcaacttatccaacattccatcaaaggtagcttcaagtcgtgctcaaagtggtgattttgacctttatctcagtggttggggtgctgatttcaacgacccaatctcgcacttgcaaattatgactaataatagtggttataattacggaaaatataacagcagcacgtacaatgcgttggttaacaaggcccaaaaccaggatgctaatgatactagtgctcgttggcaagatatgatcaacgctgagaagacgatcatgaaggaccaaggaattacgccattgtatcagacggtatactcttatttacaaaatccaaaggtaaagggtattattcataatactgctgggacacagtggaattataagtatgcttatattgccaaataattaactgattgagggacgttcatggtaactggtcgtttagctgttaccttagtaggagcgccaggtccatacgttgccttgatcaaaacaaaatagcggtccatttcgacttgtcagagtgtcttgacgaatcgaagtggaccgcttatttatttcgacgaatggttctacagtgcttgagttgtcacgcaagacaactacactgattggtctatgctggtgttacgtcgttaaccacgtacttgattggctgatgttgggccatcgcaatcacattctccgcgacaatggtagccatgccatcgcgagcttcgaccgttgcgttgccaagatgaggtgtcaaaatgacgttgttcatcgtggccaaaccaggtgtgacttgcggttcatgttcgtagacgtcgagtgcagcgccagcaatttgatgttgttgcagcgccgtcacaagtgcttgctcgtcgacaattggcccccgtgcggcgttgatgaggagcgccgtggacttcattttgctaaaagcagcgttatcgattagatgggttgtttgtgtggtaagcggcaggtgtaaagtgacgatgtcggcatgctgtaaaagttcatcctgggagacaaaggttgcgccaagttgcgtttcacggctaatcggtaggcggtggtgttggctgtataagatgggcatgtcaaaggcgtgtaatcgtttggcaacggcttgaccaatttggccaaggcctaagatgccgagtgtcttgccttgtaagttgtggccgagaaagaacagtggcgcccaaccgttaaagccgctagttcgcattaagtgatcgccttccacgatacgatgcgctaggctgataatcaaaccgaccgttgattcagcggttgcgaccgccgaaacgtttggcgtgttcgtgactggaatctggcgcttagctgctgccgcgatatcgatgttattagtgccagcaccaaaattagcaatcagtttaaggtgtggggcgtggtctaagacatcttgatctacttgagttgagagtggggtaatcaaaaagtcggcatcagcgactcgacggatgagttccgcgtgactgatcaggttatcgccggtataagtatcaatgactaactgactttgtaaaagtaacgtattagcttgggctggaagctgaccagcaataaagacttttgtcattatagagactcctttttacttttaagttcaaggacaagtaatattgtccgggtagtaatccctgcttatgtgcagtatgggctattgcaaaacgaatgacaagaaaacgagcaaaaaaactgggccaacgtctagttagcccagtcaaagatattagcttattttaatttgttgttttccataatatcatcgatcaaaccgtagtctttagcctcttgtgcgcttaagtagttatcacgttcagtatcatggttcaacttttcaacggattgtcccgagttgtcagctaaaatctggttgatctttttacgagtcttcaagatttcttccgcaacaatttcaatttccgtttgttgaccttgagcaccaccagatggttggtgaatcaagatttcagagttaggtaaagcaaaacgcttgcccttagtaccagatgaagctaagacgctagccatggaagcagccatccccataacgatggtttgaacatcagatttgatgaagttcatcgtatcgtagattgctaagccggcagtaacgacaccacctggtgagttgatatagagatagatgtccttacctgaatcttgggcatccaagaagagtagttgggcaataatggcgtttgccatgttatcttcaatgggaccggataacataatgatacggtcctttaatagtcgtgaatagatgtcataagcacgttcgccacgtgatgactgttcaataactgtaggaactggatacatgatttgttagcctcctaaggttgcattatttgattagctgattgctaatataaatgtagtttaccgctaaggtcagtgaaggtcaaaagaaaaacctcaaaaacagaattccgtttatgcagttaacgtggtatacttaggtttctatcataatacggcttgagattgggtgaacccaatctctttttttcgacgattttagttagtaggccttggattaagtgttgcgtctaccttggcttgaaaacgatgttctcttataataatgattcaagattaagcagtaatgaacttgcatattcagcactaatgtggtgatttaaaagtagtcgacccgcataattttattatcgcgatagtaggtgaatcaatttactgatagtgacccacaacgatgagtctaatagaagttggaaattcgcacgtgagccgacatattaaacgacttgaccttgttgctggactcaagttgctcgcaacgaattaatcagtatcggatgcatgaatgaaatttaccatgattaaaacgattctataatataataacaattgtagtaattattatttgaatagtgtaagtttagctgttattaaatctactaaacgactacactggtatatggtttacttgaactgattactttttgattatttttacttggacgagcgggtataggtactattactgaccccgaaaggatattacttgttgtttggtttaaattaagttaccatatggagatgtgactggtatagtccagtagttgtcacttaaataaatgcacaaaaaaagctgagaatcatttctcagctactgatgcgcccggagggaatcgaacccccatctcaagaaccggaatcttacgtgctatccattacaccacgggcgcctaaacaacatattatattctagcgaataatggataaaaacacaagggttttacataaaaatttattcagggaggtatttttatggcactgggaccaggatttcgccagcaacagcggcaatcacagaagttagcgatgacccagcgactacaacaatccattcagatgttgcagtttaatgtggaagaactaagagattttctaacgcaaaaagcattagaaaacccattgatcgatgtggatacaaattggaataataatcacgccagtttgaacgcagccaaaaatgtaaccactaaggcggatttcattgagcgtgtgtcgacctctaatcagcattcgttatttgaatacttgttggatcagattcacctaacgatgcgtgatacccatttgcgtcagattgtcctttatttaattgagtacgttgacgtgaatggttatttgcggattgatgagaggcaggttcggcaagaaactaaggcaacgccaattgagttgttggatgcaattaccttattacaacaacttgatccgccgggtgttggggcccggagcttgcaagaagcgctgatgttgcagacagaaaatgatgaccatgcaccgaacttagcctatattgtcttagaagaaagttttgacgagctggttaatcgacaatgggacttgttggctaagaagtatcaggtgacgcttgcggacatttcaagtatttatgattatgtgcgaacactaacacccgtacccggtgcggcaatcgggcaggagacgaccgggtacatctttcccgatttagtggtgacgaatcagggaggccagctggcattgcgaaccgcatccatggctcaaccggtggttaaattccgcagtcggtattatcagcagatggggcagcatgatgatcaggaagttacggaatatttgaaagaaaagaaaagtgagtatgactggattgctaacagtttgcagcaacgcgaggcaaccatttttcgagtgggaacggccattatcgagcgtcaagcagacttcttcttggaaaaaacgacggatttacggccactattgttacgagatgttgcccaacagttaaaagtgcatgaatcaacaatcagtcgaagtattaatggaaagtacattcaaacggacttcggtatgtttgaacttaaacgtttctttaccaaagcggtcagtaaacgtcccactggtggcaaaatcgtttcggccgacagtgttcaacaccgaattgtgaccttgatcgaacaggaaaataaagaaaaaccgctttcagaccaaaaaattgttcagattcttaatgcggaaaatgtcgaactttctcggcggacagtggcgaaatatcgcgaaaatcttaatattccgtcgtcatcaaggcgaaaacaatacttgagaaccgaacgataatttaacgcgccatttggaccagtcggttataagtttaattggggtttcatttgcaaccaccttatgaacctgttataattcatgttgtggtaagagaggtatgcaacattgatttcttagtgaatttgcgttgtgtgctttgttttttgaagtctttgggtcgcttttcgacatagctggaccagacccgtcccactagagagcaggttggatgccatgcattcagatattcaatggattgaggcaattgccccagatatggttgacatgctgagtcgtcgttacttagtattaagaaccattaattggatggccccagttggacgtcggctattagctcagacgttaggtgttagcgaacggacgttacggaccgaaacggatacattgcggaagctagatttgatcatgacaaacaaatcgggcatgcaagttacccagcaaggtcaagacgtgttagtaggcctaagtcattttatggatgagctaatgggcattcgccagaaagaacgacagttggcgcaatactttaatattaagcgttgcatcatcgtttctggtgattccgatcgacagttgaaagttattgggaccatgggcgaagaagtgaaccagctattacagcaattattgccggaagggcgtaatattattgctgttatgggtgggcataccatggaacatgtggcaagtcacttaactaataaattaggtgataaacgtgatttgttatttgttccggcgcgtggtggtgttggtgaatcggttgcgattcaagcaaataccatcgcgtcacaaatggcacaacatactggcggtaagttccgctcgttgtttgtaccagaacaggtcagtgaacgaacgtatgaaccactcctcaaagaaccaagtattcaagaggtgctggcgattatcgggcaagctaacgtggtcgtgcatagtatcggtgaagccatttcaatggcccatcgccggaatatgtctgaggatcagatcaaggtgttacgcagtcgtgaagcgattggtgaagcctttggttacttctttgataagaagggtaacgtggtctaccgaattccacggattggtttgcaaatcggagaactggcccatcgggagattatactcgccattgcgggtggggcttcaaaagccaccgcaattgccgcgtatatgaagaacattgcacctaaacagacgtgtttgatcacggatgagggtgcggctaacttgattttaaaaaagtaatcttctatagtgaagttgctttttaaaataaaactatttttatttccacaaggaggaaattctagtatgtctgtaaaaattggtattaatggtttcggacgtatcggtcgtttagcattccgtcgtatcttagaacttggtgaaaagtcaagtgatatcgaagttgttgctattaacgatttaacttcacctgcattgttggctcatcttttgaagtatgactcaactcatggtactttgaacgctgacgtttcagcaaccgacgattcaatcgttgttaacggtaagaactaccgtgtttatgctgaaccacaagcacaaaatattccttgggttaagaacgacggtgttgacttcgttctcgaatgtactggtttctacacttcaaaggctaagtcacaagctcacttggacgctggtgcaaagcgtgtcttgatttctgctcctgctggctcagacttgaagaccatcgtttacaacgttaacgatgacatcttgactgcagatgaccgtatcgtttctgctggttcatgtactactaactgccttgcaccattagcattctttgaaaacaaagaattcggtatcaaggttggtactatgactactatccatgcttacacttcaactcaaatgttacttgacggccctgtacgtggtggtaacttccgtgctgcccgtgctgccggtgtaaacactattcctcattcaactggtgctgctaaggctcttggcttagttatcccagaattgaacggtaaattacaaggccatgcacaacgtgttggtgttgttgatggttcattaactgaattagttgctatcttagacaagaaagttactgctgacgaagttaacgccgcaatcaagaagcatactgaaggtaacgaatcatttggttacaacgatgacgaaatcgtttcatctgatgttatcggtactactttcggttcaatcttcgatcctactcaaacagaagttacttctgatggtgacaaccaattagttaagactgttgcttggtacgataacgaatacggcttcacttgccaaatggtacgtactttattgaagttcgccactctctaatatttgattagatagttaagaactttaaaaccgcatatggttttgacggcggggggaggcaaaactcctcttgccgtttttttaatttcagcagtcacgaattctaggaggattttaacattggctaaattaatcgtttcagatttagatgttaaagataaaaaagttttaattcgtgtcgactttaatgttccaattaaagacggcaaaattggtgacgacaaccggatcgtcgctgccttaccaacgatcaaatacgtgattgaacatgatggcaaagccatcttattctcacatttaggtcggattaagagcgaagacgacaagaagggcttaagcttacgtcctgttgcagaacgtctttcaaacttattaaacaagcctgttaccttcgtacctgttactgaaggcgaacaacttgaaactgccatcaacaacatgaacgacggtgacgtcttagttgttgaaaacactcgttttgaagacgttgttaacggcgaacaagttaaacgcgaatctggtaacgatcctgaattaggcaagtactgggcttcacttggtgatgtctacgtcaacgatgctttcgggactgctcaccggagccatgcttctaacgttgggattgcttcaaacatggatcaagttgccgctggtttcttaatggaaaaggaaatcaagttcttaggtgacgcggttgacaatcctaagcacccattcgttgctatcttaggtggtgccaaggtttctgataagatcggtgttatcgatcacttaatcagcaaagctgacaagatcatcatcggtggtgggatgacttatacgttctatgctgctaaaggcatgggcattggtaactcacttgttgaaaaagacaagattgaattggctaagtcaatcatcgaaaaagctggcgacaagttagtcttacctagcgactcaatcgttgctgaaaagtttgataacgatgttcctagcaaggttgttgaaggttcaattcctgatggctacatggccttagatattggtcctaagtcaatcgaagaattcgaagatgttttacgcgacgctaagaccgttgtttggaacggaccaatgggtgtcttcgaaatgagcaactacgccaagggtacgcttgaaattggtaagttcttaggaaccttatcagacgcaacgaccatcgttggtggtggggactcaactgccgctgttaagcaacttggcgttggcgacaagttaacccacatttctactggtggcggtgcttcacttgaataccttgaaggtaaggaattacctggtattgctgctatttctgaaaaataatctgttctccgaaaggaaggtttatcgtgcgtacacctattattgccggtaactggaaaatgaacaaaacagctagcgaagctttagctttcgttaatgctgttaaggatcaattaccagatccatcaaaagttgaatcagtcgttgctgccccagcccttttcttacaggaaatggttgaagctgccaagggttctgatttaaagattgctgctgaaaatgcttattttgaagatgctggggcatttactggtgaaacttcaccagctgccttagctgacttaggcgttgattacgttgttattggtcattcagaacgtcgcggttatttccacgaaactgacgaagacattaacaaaaaggcacacgctatcttcaagaacggcatgaagccaatcatttgctgtggcgaatcattagaacaacgtgaagccggcgaagcagaatcatgggtttcaggccaaatcaaggctgctttgaaagacttatcagctgaccaagtaagttcattggttattgcctacgaaccaatctgggccatcggtactggtaagactgctacgagtgaccaagctgaagaaatttgtgcggttgttcgtaagactgttgctgacctttactcacaagaagttgctgataaagttcggattcaatacggtggtagtgttaaaccagccaacgttaacgaattaatgggcaaagatgatatcgacggtggtttagtcggtggtgcttcattacaacctgattcattcttggaacttgttaattatcaaaataactaataatagttattgcaagttgattgacaaacttctacaataagtgtgaaacaaataacaagccaattttaaggagagaaattaatgtctattattacagatatttatgctcgcgaagtcttagactcacgtggtaacccaactgttgaagttgaactttatactgaaagtggcgcatttggccgcggtatcgttccttcaggtgcctcaactggtgaacatgaagccgttgaattacgtgacggtgacaagagccgtttcatgggcaagggtgttactaaagccgttgacaatgttaacaagttaattgctaaggaaattgttggttacgatgtaactgaccaacgtgccattgaccaagctatgatcaagttagatggtactcctaacaaagctaagttaggcgctaacgctatcttaggtgtttccattgccgctgcacgtgctgctgctgacgaacttgaaatgcctttatacaactaccttggcggattcaacgctcacgttttaccaacaccaatgatgaacgttatcaatggtggggcccacgccaacaacgacgttgacttccaagaattcatgatcatgcctgttggcgcttcttcagttaaagaagctatccggatgggttcagaaactttccacaacttgaaagcgatcttgaacgaacgcggttactcaactgccgttggtgacgaaggtggttttgcgcctgacttgaagaacaacgaagaaccattcgaaatcttagttgaagctatcgaacgtgccggttacaagcctggtaaggatattgccattgcctttgactgtgccgcttcagaattctacaacgaagaaactggcaagtacgacttaaagggtgaaggcgaaaatggtcaatcatttactgccgaagaattcgttgacttacttgacagcattgttgacaagtacccaatcgtttctatcgaagatcctttggatgaaaacaactgggaagactggcaaatggcaactgccaagcttggtaagaaagttcaaatcgttggtgacgacttattcgttacgaacacggactaccttgcaaagggtatcaagatgggcgttgctaactcaatcttaatcaaggttaaccaaattggtactttaactgaaactgttgaagctatcgaaatggctaaagaagctggctacactgccatcgtttctcaccgttctggtgaaactgaagacacgaccattgctgacttagttgtcgcaatgaacgctggccaaatcaagactggttcaatgagccgtactgaacggattgctaaatacaatcaattaatgcggatcgaagaccaacttgaaagcacttcagaatacaaaggtatccacggtttctacaacttagacgaagctgcacggaacaccattactagcaagtaatttgaagttctaatgaaaacgtcgttccgatgggacggcgtttttattatacataatttaaggaacatctgtttgagtttagggtctagggacggacgagtcgtggtagaatagaaacatgcgtattttgagtaaggagcgagcagaatggatgactttcagcaacaaattaatgagtggtctgattggcaaggactgcaactgaatgccggtgcttttgaaccggtgattcaaaaaatttatgccagtgaaaatgagccttataaaacgccagaacccgttgcggataagttggccgcccgctttacggtcggacccacccaaatcgcgatttttccacccagtgaggttatcccccaaactcgggcctattatcaggcggaacgttttggactgacccggatggctcgattgagcttgggtgctccgcgtctattgcatgcgggcttcatttttgataagtaccagttctactacgtgatttatcagccactacaaggtctgacgctaactgaattttgcgcaacggctaagccccttgctaagtcaacactggggcgccagattgggacgatgttgacgcgacttaatactgaagttcctgcatttgggccaaccgctgcccaatcaaccgagtgggatacactgggccccgactttgttgccgagcgtacggcctggctacaagtacacaccgtaacgcctaatcaatttgttcatggcaatctagtgggtgggaatttaattgtgactagtggtgaattaggtttacagcgattcagtgccgcccatcaagctgcaaaacaaacggaattagtcccgctaattttgcaagcatttaatgatgatactgacttattggctggatttaaggaaacttatcaaactgacgacttagaaaaggatctgttattaggtttgttattacgcgtagatggaccacagcagattcaggcattacatcctggagcgcccgtgacgttagcggccgtccagcaagtgattgcacaacgattatcatgattaagagggggaactcatggtggcacagcggccgcacattgcaaaacaacattttgactttacacggttcagctcgattggccgggcattaattgtcggtgtgattgctgggatcgtggttagtatttttcgtttcagcatcgagcagggactgaggttcgttcaatgggtgtacgcacaaattcatacaaattggctactgctctttccatggataggcttgtctgtggctgtggcgttctttgtgggttggttagttaagaatgaaccgaatattaaagggtctggcattccacaagttgagggtcaattagctggcgagcttgattatagttggtggtcagtgctctggcgcaagtttgtcggtggtattctgggcattggttctggactgtttctcggccgcgaaggcccctcgattcaattgggagctacgattggtcagggtgtcgcgtcgaaactcaaacagacgggatcagatcgacgctccttgattgccggtggtgcagcagctggcctttcagcggccttcaacgcaccgattgccagtacgttatttgttctggaagaggtttatcataatttttcaccaatcatttggaccaccgcattagttagtgcgatggccagtaattttatttcgctcaatttttttggccttgtaccagtattacacattccgtacggccataaccttccgttgagtcaatatggcaatctgattgggctcgggatttttctcggtattttcggttatctatatcaaaacgtgacgctgacgatgccaaattggtatgccaagttgcggttgcccagttggttggatggcttggtgccatttttactggtgattccgattggattaatttggccgcagctattaggaggcggcaatgctgttattttgaatttggccgcagtaacgccagcgttactcgccttgttaggaattttcgtgttacggtttaccttttctaccatttcatatggatctggtttgccggggggcatcttcttgccaatcttgtcactgggcgccatcttaggtgcaatctatgcccagttcatggttgccgttggttggatgccgacgaacttgattccgaactttattatttttgcaatggctggatactttgccggcattggtaaagcaccgtttaccgcaattttattgattactgaaatggtcgggacactacaccacttgatgccattagcagtcgtttcgatgacggcctacttagtcgtggatctcttaggcggcgctccgatttatgaggctttgctagagaagttaattcagccgcggttaccggaacatagcggtatccaggatcggttagaattgccgatctttgaaggctctaagttagagggccatcaagttcgtgattttaaatggccagcagagtcattattgattgctattcgccgcggggagcgtcaagtgatcccgcatggcgacaccttgatgcgggctggtgataccttaattatcttgactgaccgggataaccgtgcgtgggtgcgccatcaaatcgcacatttaacggtcgcgacgccctgagcactaaacaaagcaacgaattgttcaggatactggaaaaataaggcaaaatatgttaaattgttatagacatagcggaggctttaggaggcacatttcttgtataatttattgttaacgttaatactggttgtttccgttttgattatcattgcggtgatgatgcaaccatccaaaactaatgatgccatgtcttcattaaccggtggtgctgatgacttgtttgccaagcagaagccccgcggttttgaagcgttcatgcagaaggtaaccgtggtattaggaatcgcattctttatcctggcgttagctctagcatggtactcatcgaagtaattgaccgtcctcctgtgatttcaggaggcttttttttaaggtggtgtaatgatgctgaaacaaccggaaccgtttttctttgaacatggccaacatgccgtcattttattgcacgcctatgcgggaagtgccaatgatgtgcggatgttagcacgagcattagaacgggaagattatacagtttatggcccccaattcagtggacacgcgactgatgatccacgagatattctcgcacagacgccggcgcaatggtggcaagatacgcaacaagcaatatcatttatgcggcaaaaaggctatactaaaattagtatctttggcttatcattaggtggtatttttgcgacggcggccttggagcgtgatcctcagttgctaggtggtggcacgtttagttcaccactatttgctggtaatcgtagtgacgttgctgaaatgtttatcacgctgagtcaccatcaactggcgcacagtcaattttcaattgccgagcgtgaacagatcttaatgacgttgccggaactggttcagcggcaattgcaggcagtcaatacctttactacgacagaggttacgagtcacctcagcgctgtgacccaacctttcttcattggtcagggtgggcaagatgaattaattgatgcgacggtggcgcgacaattacgtgatcaattaccacaagtaccagttgattttcattggtatgctgatgctggacacgtgattaccgtcaacagtgcgcatcaccaattggaacaagatgttttaacatatttaaaaactatttataaatgaggtaaataatgtcagaagcaaacttacaagaacaaatcctgacttttttgcaagctcatcccgatcgcacgtatagtgttgaacaactaacggatgaattgcattttacaggcgcaacggcgtttacttttctagtaaaggaacttgcgaatatggaacgtaaaaaattagttagtaccgatgatcatgatcatttcaagctggtccaggaaacgaagactgttgaaggttcatttcatggtaatgacaagggctttggtttcgttcgttacgatcccgatttgcctgatatttacattaatccggacaacacgcagtttgccattaccggtgacgatgttgcggttgaaatcattcgaccagcccgtcccggttccgaccgcggccctgaaggtaaaattgtcagcatcgttaaacggaactatacccagattgtcggtgcgtatacaccaagtacggatgaagacgggattattggttctgtggaaattaaggataagaaattatccaaatatcagttattaatcactgatcagggcttacaccccactgagggggaagtcatcattgctgaagtggctgcttatcctgacgctcagcatccaacgcggatgattgggattgccaagcaggtcattgggagtgttgatgatcctgggatggacgtcttacaagtggtctaccaacacgacgtcccatcagtgtttccagaagaagtgacggatgaagccaaccggattccggattacgtgactgatgaagaaaaagttggtcgggtcgacattacggaccagccattagtaacgattgatggcgccgaatctaaagacttggatgacgcggttgttgcttggcgcttgccaaatgggaacttccatctaggcgttcacattgcggatgttagccattatgtcaccgagaactctgagttagaccgggaagcattcaaacgtgggacgtcagtttacttaactgaccgtgtgattccaatgttgccacggcggctatcaaacgggatttgttccttaaatcctgatgttgaacgattagccatgagttgtgagatggagattgatcaaacgggggaaatcgttaaccataagattttccaaagtgtgattcggtcacacgcccggatgacttatgacgctgttaatcagattctcgaagcccatgaccccaagactcgtgaaaagtacgcggacttggtcgacatgtttgatacgatgggcgacttacaccgtatcttgtacaagcatcggcggcatcgtggtgcgatcgattttgatgataacgaagctaaaattatcgttgacgaagccggtcatccaattgacattcaattacgggtacgtggcttagctgaacgaatgatcgaaagtttcatgttggcagccaacgaaacggttgcaaaaaactatagtcaacttaaggtaccgtttatctaccgggtacatgaaacgcctgatagtgaccggatgcttagtttctttgaattcgtcactaactttggtgtcagtgtcaaggggagttctaaggatgttaagccgaagatgcttcaagacgttttgaagaaggttgctggtaagcccgaagaagccatggtctcagtcatgatgctgcggagcatgaagcaggcccgatacgctgaccagtcgcttggtcactttgggttggcggcaccgtattatactcactttacgtcaccaattcggcggtatccagatatgatggttcatcgtttgattcgccattatgctgaaaacggcactggtgaagaagcccgggcacgttatcgggataacctaccaaatattgcggaaacgacttctgatcatgaacggcgggggattgatactgaacgcgacgttgattcgatgaagaaggctgaatatatggctgatcacgttggtgagacgtttgaagccgttgttgattccgttatgaaattcggtctgtttgttgaactagaaaataccgttgaaggcttagttcatatcagtacgatggacgacgactactacgaatacgttgaaaaacaattagcgttggttggccgtaagacgaaacggacatttagaatcggccagcccgtcaaagttcaactaatgcgggtcgataaggatcaacgagaagtcgactttaagttattgaatcctgaagaagcgccaaagactgatttattgccaaagcgggaacatcatgataactatcgtggtaataaccggcgtggtggcaataacggtaactaccggcgaaatgggaacaataataaccggaataacgaccatcgtggtggcaacaacaataaccatcgtaatggcaatagcaatggtcgccggaacaataataatcataatagcaacaataataatcatagtactaacaacaatcggcggtcatcaactgatcgtcggcgttaatttttaagtaaggggatgtgcggcaatggccaaacaacacggtaagcacccagataccgccctcgctcaaaatcggaaagcacgccatgactacgctgttgaggaaacctatgaagctggcattgcgctgacggggacggaaatcaaatccgttcgcgatcggcgggtcaacttaaaggatggtttcgttcaagttcgcaacggtgaagcctggatgcaaaacgttcacattagtccgtttaaagagggtaaccgttataacgttgacccgttgcggtcccggaaacttttgttgcacaagaaagaaatcagtaagctaggtgcagcaacgatgactaagggtgtgacgattattccacttaagatgtatctcaagcatggatttgcgaaagtcttaattggagtcgctcacgggaaacgggaatacgacaaacggcaagatatcaagaaacgcgaacaacagcgtcaaatcgaccgggttatgaaacattactaggcatcgattacgttagcgttgcatcgctgcaccatacaacgagtatggcagcgtcataaaaaggtcttccaagaattaattcgattcttggaagaccttttttagtatgtgttgttggtggttctgtgccgtggacggacgacggcaagcatatattttatatgtactgatgtagtgctcactgttataaatgttctagatactagcaaaatagttatcaggctataaatattttgcgaaaggtcgggtacaagcacttgcgacttagtcggtaattatgttagcatataattgtattgatagttaaacgcgttatttattaattgattcaataaatataattgatgctaaactttggagaatgttattattctgatattaatcagatttagtataactcaaattgataataagttaattttgatatgatttattgcatggattcttggggggacatgtatgaatagatttataacgagcaagcagcattataaaatgtataaaaagggacgtttctgggtatttgctggtattaccgtggctacctttactctgaatccactgataagtcgagcagatacggaaacgacgaccgcagccaccgcagctacgaccactgctggggcatcctcatcatccaactcacaggttttaaggactactacgactagtacaacaggggcaacgactcagtctagtgcgacggcgattaatgcggcaacaacaaatactagtgctcaaaaaaaacaggcggttagtggcaccactactgactcaaagactgaacaaccggttacggcagtaggagaaaatgaaaacgcaaccagtaatctcagtacctctgattcggcatcagcaagcagtcaggctaaaactggttctggcgacagtttggaccaaacgtcaaacagctcagtaagtgtcgcatcgagttcacagaaagtcacaacacaaaattctgattatcaaaatgatcaaggaacgggctctgagagtggcattcaatctaatgtgacggacacggtggtggctgatgaatcactacaaactaatcgttcaagtgtcgcatcgccaagtactagcacaatggccagtattagtgactcagactcgaaagattctaatgaaactgaaaaagttgtggattcagaaactagtccgatagctgtaactgccacaactaatacaattacgacgactaacgataaagtccagttaaatcgggcactattagcgcgagccgccacacccgcaactgttgtctcaactgggactctgggaacaagtgcctggcagtacacagatgatggtgtgttgacgattcatgctggtgattggaccggagtgggtgatgtcagcgacgtaccgggggattttggcagtgagttaacgaaagtagtgattgatggtccaattaatgcggggactgatactagttatatgttccggtataatccaaatttggccagtattgatggccttgaaaatctggatacttcgaaagtcactgacttttcaatgatgtttatgggaactaagattgctgacttttcaggattagcgcattggaatgtcagttctggtacgtcctttgactctatgttcgccagtgactcgcgagttcaatcttatgatttaagtcagtggcagttgaatacggttcaaccagtgagcttaaaaagaatgttttcatttaacacggccttgatcagtattgttctaagtacttggaatgtgcggatggtcacggatatagatgggttattcaatggagataagagtttaacaacggcggatttacatggctggaacttgttgaatgttacagcgttgtcatcgatgtttttaaatgataccaatctcactgatcttgatataacgggctggcagacgggcagtacgttaactagtactaagtttatgtttgagggaacccctggattaaaggcaatcaacattgcgagtttggacatgtctaactttgcagcagtcactgaagctgatatgaataaggaacctgcagatcatgatatgtttttgaatcaagatagtagcgggaatccgttgcccatgaacctaaacgcattaacggttgggtcaaaaacatatttagtcggtagttcattgccagacattccaactggaactggctataccggtaaatgggtcaatcaagctgatgccacccagacgtatacgtcgagtgagttaatggctttgtataatggcgtcgataatccagccgatacaatcacttgggtctgggaaactagcccatcctatgctgatttcacgtccaagaatgtaaccggattaattgccgggccgaagacgacgtggcgagttgccgatagtgttgcaacattaaaagatgtgaatgggactgatatttatgcgaccgctgacacagtcgtcaaagtgattagcgtgaacggcgatactgctgtaacgacggtcgacactcaaactaccggtacctatcaagttgacttgcagtatacggatgcgtatggcaaagtatggcagcaaactagtacggttgcggtagcggtaaatcaaggcaaactagttggtaaaccgttgacgatcaaaatgggtgctaagccaacgtatacgattaatgatttaatcgacacggataactcccgcaatgcggccggcgataagctaagtgccgacgaactcgcgacggctacggttacaggcttggatacgagtaaagctggcacacaaacggttacactggcgtatacggatgatgctactggcatggttcacacgacaaccactacggtgacgatggtcgcaactaaggccgacttaacaatgcgtaatagtaccatcattaaaggacccaaaaactcgagttgggactaccgccagtatgttacgagtgtcactgattttgatgggaatccggttagtttagacggacttaacattgtggttgatcagcaacctgatttaacgcagattgggtcgcaaactgtcacactcacgtatacggatacgttgggcaatgtcatcagcgtcccaactcaagtaacagtcgttgcttctcgggcacaagttacaaccaaggcgccgttaacgatttggcccagtgaggttgctcaattaaaagtcgccgatttggtgacaatcacggctgccaacgggaaccccgtcgatactagcaccgacctaacagatgtcacaatgagttcaattgacacgagcaagggtggcgcgcagaccgttactattacttatacggatgaagctggcaatctagtgacagcttatgccaaagtaacggttgaccaatcagatttgaagaccaagctaacgaatccaattgcggggcctaaagctaaatgggactatctagctggtttggaatgggtcaaggatgcaaatggaaagttgcttgataatctcgcaaccgctgatattaaagtcgttactgaacctgatttaagtgttgcgatggtcggccatgaccaaacggtgacactcagttatacggatgagttgggcaaagaacacttagtcactgcggttgtcaacacggtggcttcgaaggcgaagattacggctgtcagcgaccagatcatcatacctgatgaagccaaaaagctgacggcaaccgacctggtcagtgagttaattgatgcggcgggaaataaagccacgaattttgacgatgtgacgatgagtggttttgatgctaaagctatcgggccacaaactgtgacactgatgtatacggatgcgtatggtaaccaaacgactgattcgacgacagtcaccgtggatttcgccacaatcactggtcaagcgacacacccaattgccggtccaaccgcgacttgggattaccgtgacagcgtcactcaagttatcgatgccaacggaaagataattgatgtcggcgatgctgacattacagccatgacgccggatttaactccggcaaaggtgggcaagcctcagacggttacgttgacctatactgacagtctgggtaaagttcacacaaccgacgtgattgtaacgacgacgctttcagaggcgaagatcacggctgttgctgaccagattatcatacctgatgaagccaaaaagctgacggcaactgacctggtcagcgagttaattgatgcggcgggaaacaaaatcacgaattttgatggtgtgacgatgagtggttttgatgctaaagctatcgggccacaaaccgtgacactgacgtattcggatgcgtatggtaaccaaacaactgattcgacgactgtaaccgtggattccgcaacgctaacgcttcagaatcacactcaagtggcaggacctaaggcgacttggaattatgctgataacatcaaagccatcactgattctaaggggcagtcgctaacattaagcgatgccaagattacggtcgtgcaacgtccagatttaagtgtggctggaacttataaaattgtacttgaatatactgatgatttagggcaagcgcacacagagactgccgatgttgaagtgacggcttcaaaagcggccattactgccgtttctaagcaggtgattttggcagaaaaagcgaccatggtaactgcgtcgtcactagtgtcgacactgtacgatgcggatggcgttcaaatttataattttgatgatgtgacgatgagtggctttaatgctaaagctatcggaccacaaacagtaacgttagcgtatacggacgcgtatggcaatcaaacgactgtttcgacgactgtaaccgtggatttcgcaacgctaacgcttcaaaatcacactcaagtggcgggatctaaggcgacttggaactatgctgataacatcaaagccgtcactgattctaagggacaatcgctaacattaagcaatgctaagattacggtcgttcaacatccagatttaagtgtggctggtacgtatccaatcgtgattgaatataccgatgatttaggacaagtacacacaaagactgccaatgtcgaagccacggcttcaaaagcgtccattactgccgtttccaagcaagtaattttagcggaaaacgcgaacatggtaactgcgtcgtcgctagtgtcggcactgtacgatgtggatggctttcaaattcataattttgatgatgtgacgatgagcggttttgatgctcaagctatcgggccacaaaccgtgacgttaacgtatacagacgcgtatggcaatcagatgactgattcgacgactgtgatcgtggatttagccacaatcactggtcaagcgacgcatccaattgccggtccagcggcgacttgggattatcgtgacagtgtcactcaagttatcgatgccaacggaaagacaattgatgtcgatactgctgacattacagccacaacgcctaatttaactctggcaaaggctggcaagccacagacggtcatgttgacctatactgacagtctgggtaaggtccacacgaccgacgtgattgtaacgacgacgctttcaaaggcgaagattacggctgttgctgaccaggttatttggcctgatcaagctaaacaactgacggcaacggacttagttgatcgtttatacgatgctgaaggccatctgattacaaattacgacaatgtcgaaatgagtgtgctggattccaagttagcggggcagcaacgtttgacgttgacttacacggatgttgcgggtaatcaatccgtcgcgtatgccaatgtgacagtcgaccaggcaaagctagtgacaaaaccaagtacggtaattgccggcccgacggcaacgtggagttacgaagccggtattagtcagctgacgaatgcagctgggcaacttattaccgtccaaccggggacaattaaagtgttgaacaggccagatctgaatgttgattcagtcgggcaacaacagctgatcacactgatttatacggatgagctcgggaaatcccagtcggtcacggcaatggtgacagctgaggcctcacaagctacgttaacggccaagaaagcagttatcctgcaaccggatgccgcggcaaaactaacggctaatgaccttgtaacgagcttaacggacgcctctggacaagcggtgactgattatcaaatcgttcagatgtctaagctagacgcgactcggccaggtgttcaacccgtctcattaacttatacggatgcggctggtaacgaagtaagtaccgttgtaaaagtaacggttgatcaggccaagatggagagtcagaaccggactcaaatctggggaccaagtatgacttgggattatcggcaacaattggcaactgttacggattcgcaagggcatcagttgaatcctgatcaagctaaaattacggtcataaccggcccgcaactgacggctaaaatgatcgataagccgcaaacggtcaccttgatgtacacggatgatctgcaacagacgcatactgtgtcagccactttgaccttaacggcatcacaggcggcactcgtgccacgtccggcacagattgtatgggccaaagatgcggggcaactgacgccagccaactttttgcaaacgattaccggcgcggatggcactcaagtgtcgtctttgaccaatgtcaagatgagtgcggtcgatgccagccagcctggtgcccaaacggtgactctaacgtataccgatgattacggcaacgaggtgacaacaactgcccaagtgacggttgatcaagccgccttaacgacccaaaccgctcgaccggttgccgggccgactgcccattgggattatcagacgaactttaaaaccgtgacgaatgctgccggtgaagtgattaatgtcggtgatgccaatcttaaagtcttgacaggcccggacttgagtacagccatggtggggcggcctcaagtcgttacgttcagttacactgatgaattaggattgacccaaaccaccacggcggaggtcacaacagtcgcctcacgggcgcacatgacgactagtgctgatcaggtgatctggcctgcagttgtcggaaaattaacggttgcggatctagtcactggtttaacggacgcctggggccagactagtcaaaattatcaaagtgttacgatgacgaccatcaatgctcaacaggctgggaaacaacaagtcaccctgacatatactgatgaggtgggcaacgtaaaaactgcgactacgacggtgacagtcgaccaagcagcattaacgactcagccacaaacggtcatcgcgggtccgactgccaagtgggattatcatcagggtattggaacgattactgatggtatgggccagccgattgcggtcaataatgccgctattacagtcgtggcgatgccagacttaacggttgcccatattgggcagccacaaactgtgcaactggtttacacggactcgctgggacaacaacaaacggcgttggtccaagtgacaaccgttgccacgcaggctaaaatcagtacgcggccagttaccgtgattgccggccctaagacgacctggtcactgaatgatagtgttgactggtcaacgagtttggcagcggatggcacgttgctgacagcggcgcagcgccagcgggtgactgtagatggtaccttgaacttacggcgggccagcaattacccactgacactaagttacatggaccgtgcgggtaatttgattactgtcacgacgagcatcaatgtattggctagtcaggcccagctacaagtgcgtgatagtcagttgaccgttggaaacgcttggactgctcaggataattttgaacgtgcaaccgatgcccagggccaagcactgacattagccgatatcgcggtcgatggtacggtcaacacgcaacgcgctggccagtacacgttgacttaccactatactgatgttgccggtaatcagttaactaaaacggctgtggtgaccgttgtcttgccggaagatgatcacattaacacgaccgaccctgacaacaatgatcatggtgagacgactaaccctgacaacaatgatcatgcaggtatcgctgatcctagtgaaacaccgaagccgagtgagcgacctaacgattcggatggtcataccgtcgactggggcgttgatgatcggattacgacaaagcaacaaccggccgcggctactcgtgcacagactaaggtcaagacgaccgctgagccagctctaccggccaacaatgagcatactagcgcagccaaagcagcagcgacacctgtgacacgagtaactgacacgactgctgacacactgccacagacgggcgagcgcgaccgctcagcacaacaaggcgcggtagtactcggattaacgggattattagggttaatgggattaggacgtcggcggcatacgcatgaggattaagcgtacgattggcgtgttaagttcatcgattagctaaaattgatagcgatttcttgcaacggaccgattcattttgaattggtccgttttgttaactgctgctgtttggacttaacggctggttgcgcgggttgatgaatctagtgtcaagtattcagttaagcagtgattaatgcttgaacaaaattttaaaacataaaaagggggtactttcatcagaatctttgctagaaatgactatttactttattttattaagtaaacagctgatgatagcgacatcattaaagctaaattaaaaaagtataaaaaattgaattggtcgcgagacatgaattatgttatattttatgacataccgttccggtaaactatttgaggaggtctcgtcgatgagaaagtggcaagttgcagttgtcatgttgttagcagcgttgggaagctggtttgcgattggtacccaggcccaggctaagacgtatacgattgcgacggatacaacctttgcgccgttcgaatttcaggtcaagggtggtaagtataagggaattgatatcgatattttgaaggcaattgccaaaaaagaaaatttcaattataaattaaaagcgcttagtttcggtgccgctgttcagcagcttagtgcgaaccaagttgatggggtaattgccggaatgaatattacggctgaacggaagcagacgtttgatttttcagacgcttactatacttccggggtggtcatggctgtggctaaagatagcaaggtcaaaacgtttaaagatttgaaaggtaagaccgtggcccttaaaacggggacagctggtgcaacctatgcgaagtcgattcagagcaagtacggcttcaaaatcaagtatttcaatgactcgaataacatgtataacgatgttaaggtcggcaactcggctgcttgttttgaagactatcccgtgatgtcatacggaatcaagaatggcatcgcgttgaagattgtttccaagcaacacgaggccggcgactatggtttcgcagttaaaaaaggtaaaaacgcggaactgttaaagaaatttaacgcgggtctcaaagcgattaaagcggatggtacttacaaaaagatcattaacaagtacttgaagtctagtgaagcatccttaacgggtgaagacgcaagcagtcggacctttattggcttgttcacccaaaacttggatacgattggctcagggttatggatgaccttggaattaacggttatttcaattattttagcgacgatcctcggactgattcttggggtcttaggcgttatgccgggtaaacttggtccggccatctccagtacgattatttatattttccgtgggatgccattgatggtgttggccttctttatttacattgggttcccagacctgattgggcacggctttaagattcccgcgttcgttgctgggatgattacgttgatgcttaacgaaggggcctataccggagcctttgttaaggggggctttgccgcggtcgacgatggtcaaatggaggcggcccgttcactcgggttgccatactggacggctatgcgcaaggttattatgccccaaggaattcgaatcatgattccgtcgttcattaaccaatttattatcacgctgaaggatacgtcaattctatccgttattgggatcgttgaattaacccaaactgggacgttgattattgcccggaacttcgaaggctttaagatttggttaatgattgcgattatttatctgattatcattacgttattaacatggttatctaactgggttcaaaggaggattaactaagcatggcgaaagtaattgtcaaagatttgcataaaagctacggcgataacgaagtcttgaaagggttaaaccttgaagttcaagataacgaagtagtctgcatgattggaccatctggttctggtaagagtacgtttttacgctgcttaaatgacttggaagttccaacacaagggcaagttgtcattagcggttacgatctttctgacaaggggactaacattaatttggtccgtgaaaatattgggatggtgttccaacactttaacttatttccacacctatcagtgttacaaaatattaccttagcaccgactcaactcaaaaaggaaagtcaacaggaagctgagaaaacggcgcgtgacttacttgctacggtcggcttgtccgataaggcggatgccatgcctaagtccttgtctggtgggcaaaagcagcgggtggccatcgctcgagcgctagccatgcatccgaaaatcatgttgtttgatgaaccaacttcagcactggatcccgaaatggtcggggatgtgttggatgttatgaagaaattagccgcagatggtatgacgatgattgtggtcacgcacgaaatgggctttgccaaggaagtggccgaccgggtcgtctttatggcggatgggttgattcaagaaacggggaagcctgaggatgtattcgaacacccacaaagtccccggttacaagatttcttacaaaaagtgatcaacgtttaagtatcggctggtcataataaaataacccgtaaaataggcgcgctaagaattggtttaattcttggcgcgcctattctgtagtaacgtgcttgcatagcagatgaagcggtgttgctctgaggacgattaactagtgaataccgtgatatgggcaacttgatcggcacgtcaactttgatagggtgttaagctggcaaactagttatgccaacttaactaaaaacaacggtcatcccgaaacaggggtggccgttgttttatggctagttctatttagtgttggggcaccttattacggggtgtcaatgtataattactttcaccaaagctaacattgagtccctttttcgcaactggtgtccgcgcgcggttggtcggcttttgccagtgatccaggatcgccgcaatgcaaatacacagtggttctgtggattgatcagtaattgctaattcaaatgcttcaccgttagtggtgacaactggtcgcatcgtcatgattaattcagtaccatgataaacgcggtagttttcggcactcaagcttcccatgataatccagcgaagcttgcgaacatagagcatttcatgccagaagcccagcgttttactaatagaaccgacgttttgacggttatagtataaatcgaattttggcaacaatccgagggttgtttgtcgaatttcggcaagtagctcaccttggatcgcgtataaactgagcgcgtcttggcgccgcccccaccgaccaactaagagatagtgagattggttgtgcgcatcgcgaacaatccgggcaccttgggcgaagctattgcggctgaaatataatttacgcatcttcaacctccgttttccggaaactattgtttggcaagcacttctaagattgctttgccgacaccatcgttgacatttgtatcagtgatatagcgggccagctgtttgacttcgggactggcattacccatagcgtaacttacgccagctaattcgagcatggagacgtcattattattatcaccaatcgccatgacatcgctcattggggtattcagcatattcgcatagcgctcgactgcaatccctttttgcgcattaatattattgatttcgatatttgatgcggatgaagatgtgattttgagggacgaatgttttgccagaatttcatcactaaggggttttagcttagcgggcccttcttcgctgaaagcgataatcttcatgacatgcttagttggatcatccaataactcgttatagttgtccacgtaattgatgtccataagttctaagcgggctgacgcgagcgataccgcaattttgaacgttgtatctggattcaggttagttaggagatgtgcaatttgttcgattcgcttggctttactgttagagtaaataccatcgttgcctacgacttcaaaatagtaaccttgtgaggttagcgtgtgaaaaacggtgcgggccacgctattggttatgggcaccatgtcgagcattttgccagaagcgtcgtatacttcggcaccgtttaacgtaatcaaaggtgccgtgatgccttgagcggccagtagtggctgagcttcagaaaatcggcggccggtggagacgataaagtgcacgccttgctgttgtgcttgacggatggcattagcgttaaaatcggaaacgaccatttcattgttgagtaacgttccgtccatatcagaggcgataatcgaaatcatgttgtcacatccttagttgttttaataattacattctaacatgtttacgtctgaatacagaattattatcattagtggttttggttatgatacaataaaacgagaggtgttaaggatgaaagcgtttattcacacggactggtgggacgtcttaaaaccagagtttgagaagccgtattaccaccaattacacgaatttttgaaaaatgaataccgaacgaaaaatattcacccagatatgtataatatttttcaggcctttgaatggacgccatttgctgacacgaaggtcgttattttaggtcaggatccgtatcatggtcctggtcaggcacacggactgagtttttcagtgttaccgggcgtggcagtgcccccatcactagtcaatatctataaagaattgcaaaatgatgttgggtgtacgcccgtcaaccacggttacttggaaagttgggccaagcagggagtcttgttattgaactccgtgctgactgttcaaaatggtgtggccttttcacacgctggtaagggctgggaacgacttacggacgttgccattcagcgtttatcggaacgatcgacgccggttgtctttatcttgtggggtaaggcggctcggtccaagattaagctgattgatacccagacgaatgtcgtgctacaagcacctcatccgagtccgctttcagcttatcgcggattctttgggtccaaaccattttcaaaaacgaacattgcgttaacatccttcggcgaacagccaatcaattggcagttaccagagcacgtcaatcttgagcattaattaatttattggagggttatcacatggatttatttgagtcattagcacaaaaaattactggtaaagatcaaacaattgttttccctgaaggaactgaaccccgaattgtcggtgcggcagcgcgattagctgcagacggcttggttaagccgattgttttaggtgcaacggacaaagttcaggctgtggctaacgatttgaatgcggatttaacaggcgttcaagtccttgatcctgcgacatacccggctgaagataagcaagcaatgcttgatgccctcgttgaacggcggaaaggtaagaatacgccagaacaagcggctaaaatgctggaagatgaaaactactttggcacgatgctcgtttatatgggcaaagcggatgggatggtttcaggtgcaatccatccaactggtgatacggtacggccagcgttacaaattattaagaccaagcccggttcacaccgaatctcgggtgcatttatcatgcaaaagggtgaggaacgctacgtctttgctgactgtgccatcaatattgatcccgatgccgatacgttagcggaaattgccactcagagtgcggctactgctaaggtcttcgatattgacccgaaagttgcgatgctcagcttctcaactaagggttcggctaagggtgaaatggtcactaaagtgcaagaagcaacggccaaggcgcaagctgctgaaccggaattggctatcgatggtgaacttcaatttgacgcggccttcgttgaaaaagttggtttgcaaaaggctcctggttccaaagtagctggtcatgccaatgtctttgtatttccagagcttcagtctggtaatattggctataagattgcgcaacgatttggtcattttgaagcggtgggtcctgtcttgcaaggcctgaacaagccggtctccgacttgtcacgtggatgcagtgaagaagacgtttataaggttgcgattattacagcagcccaaggattagcttaaacggtcacttagtttgttaaacgagggaaacttcagagcttgtactttgaagtttccttcgttttttctataataagaacagttaatttggatgaggagttggaagaatatggaatcaatcacggtaacgtcgccggaagcaaccatggcaatcggggccaaacttggccaattagtgcaacctggtgatttaatcttactagatggtgatttaggtgctggtaagacaacttttacaaaggggttagcaaaaagcctgggcattcctaataacgttaagagtccgacttttacgctcatccgggaatatcgtcaggggcgactaccgctctatcatatggatgtttaccgcttggaagatggcggtgcggaagatttaggcttagatgaatactttgatggtgatggcgttagtgttgtggaatggtcacagtttattgccgacctcttaccgacgacttacttgcgaattgcaattagccgggacactgatgccgatgaccagcgggtaataaccttcaagcccattggtgaacactatcaacgactggttgatcaattgaaggagtgacaaccatggcagaagaagttgttgatgtacggcctgctgaagtcgcggatgcagcacaattattagcgctactagctcagcttggacgtgaaagtaatactttcactgttgatgaaggcattgaggatttgagtgaaacggatgaacaggcgcaaattgagcgtatcaatggcacaacgaccaacattattttcgttgcgacattagattcacggttgattggtgtgagcaccgtgcaagctagtacggattttagtgcggcgcaaggtgaagttggcgtagcggtacttaaagaattttggggcatgggtctggggactgctttgattgaggaagtcttagattgggcgcgtaactatagctcattggaacgcctcgtgttgacggtccagttacgaaatgtgcgtgccgtgaagctgtaccagcatcttgggttcgaaaattgtacggcaacgagctatgatgtcgttgacccaaccggcaaacgggttccagctattgatatgggaatctgggtttgaaatccgggattcgctgaactgacggcaaacaggttctgatagtagatgggccggaatttaagcgttgacgaaccaggtctaaccggcgacggcttgtgaatgattggctcatctcccagtcggttgggggaattgataagctgtctacgagtattgataatcggtagcgatgcgtaaacaaaaaagtccagcatcttattgctggacttgcataaatttaattttaaccctgaacgcgaacgaaaggtttgagttgctcagttccaaaagcttgcgcttcggtgagtaaaatgttggcgcaagctaggctgtcatctagtgcattatgatgatgctgcaggtcgatatccagtgcttgacagactgtatccagcttgtgattaggcaattctggatagaaccgttgactggtcttgacggtatccatggataggtactccggcgcgctgatgccgtagtgggcaagcgtattgcgtaacacaccaatatcaaaaggcgcgttgtgcgcaattacgaggcggtcgcgttggaagaatggtgcaatgtgttgccaaacgtctggaaacttgggcgcgtctgcgacatctgcttcatgaatcccatgaatttggacgttccgccagaaaaaatcgctctctggtttgatgagtgtgtaaaattcatcgctgatttggttattacggacaaccgttagcgccagtgaacaagcactgtcgcgtttcgcgttcgccgtttcaaagtccattgcgacaaagttcaaagttgccaccaccgtttctaaagaataggattatcgtacaaagaatctcgttaattttcaagttaatggttcggaaggataatatcgagttccactggacagtgatcggaaccaaaaatttcattatgaatgcgggcgtttaggagctgactgtctaattgctgtgacgtaataaagtagtcaattcgccaaccagaattgttgtcacgtgcatgcccacgataactccaccatgagtaaatgtcggtttggtcaggatagaaatgccggaatgtgtcggtatagcccgctgcaaggaggcggtcaaacttggtccgttcttcgtcagtgaagccggcactatggtgattgctacgccagttcttcaagtcgatgttttcgtgggccacgttaagatcaccacaaaagatcaacggcttgttggcactcaaactgttaatatatgtgagaaaagcatcttcccactgttgccgatagtcgagacgttttaattcaccgcctgaattaggagtgtaacacgtcaagacgtagtagtccgcatattcaagggtgatgacgcgaccttcgtcatcgaattctggtacaccgataccataagttacattgagcggctcgtgtttggtaaaaatcgccgtacccgaataacccttgcgctcggcatagttccagtattgataataacctgggaagtccagttcaatttggcccgcctgtaatttcgtttcttgtacacagaaaaagtcggcatcgagctcattaaaagtcatgacaaagccgtgtttgacagcagcacgcagtccattaacgttccaagagataagtttcacgtgagtttcagacctttcaagtaatttactcatattgtaacacggcagccactggttattttaatgacaattgaatcagtgcgccgtgattaaagccagacacggcggatagatgtgcgatagggtgacaaagcatgctggtgtctttggttggcctagtttcagcgcgtccgagcgggtatctttggctttcagtgatggcacgtttttccagctaacaatcactggcatgaattggacgctgaatgatttaaatcagtgtgccacggagcaatcagtagtagctaaaagaagattgatgataaaattggaggaatatcgatgttaaaaattggggtcattggtttaggtaacattgctcaaaaggcgtatttacccgtcatggcggcgatgcaagaccagtatgaatttcatctaacgacgcgtaatccggaaaaacgagcacaactagcgacgatgtatgggtttcaacacacccatgcgacccttgaggaattaatggcagttaaaccggcggccgtatttgtgcatactcccacggacacgcatgcagcaatcatcaagcagttgttattagctgggattcacgtttatgtcgataagccagtcgcgactgatcttcaggtggtccaaagtttgtatgatttggctgcggcgcggcacctgttattgacttgtgggtttaatcggcgttttgctccttttaatcagcaattgaaggcattgcctgacaaacggatgttagtggctgaaaaagttcgcgaagtgggtagtcaagatcctgaaacggcggttttcgacctgatgatccacatggtcgatacggggctattcttgttagatgaaccacttgaacacactagtggtcggttgacgacgacggcaactggcgcgttggcgcaaggctatttgacggtgcagacggctcatgagcaattagaagttatcacgaatatgtacggtggggtcaatctggaacaagtgacagtccaaacgacggggcaacgtgcgtctgtgactgatttaagtactaaaaccgtgatgacgacggcaacaactaccacgacggcttttccggattggacaccgacattggaaaagcgaggatttgcaccgctgatccgtgcttttctgacggcggtaacaacgcacgggcctaatccagtcgacccaactggcgcaattaccagtcacgcggtgtgccgtcatttattaagtgattaaaaagtgctaaaattaactgataggcttacaaatttcaacctgattatatcgtttcaatagcgtttcaatgctgcggtgcttgatacgtcggcctaaattaaaaacgctatgcggttaaagtgattattaacgtaagtgaattaaatcgaaacacgaaaggagcttttcaccatgaccaaagatgtcttggccacttttccagccatcgaaattaaaaaaaatgaatcactaagtcattatacgaatactaaaacaggcggtcccgccgattacgttgcgtttccaaagtcaatcagcgaaacgaaagctctgattacgtttgccaatgagcaaaatttaccactaaccgtgattggtaatgccagtaatttgattgtcaaagatggtggtatccgtggattaacgatcattctcacccgcatgaagcaaattcatgcgagtggcaccaaagttgttgctgaagcgggtgccgcaattattgcgacgactaaggttgcttgtggggctagcttgactggtctcgaattcgcagctgggattcccggtagtgtcgggggtgcgattttcatgaatgccggtgcgtacggcggcgaaatgagtgaagttgttgaaacggtgacggttttgacgccagcgggtcagcttaaaaccctggatcatgacgaattagattttggctatcgccacagtacgatccaggactatgatgatattgtcgtatcggtgacgtttggtctcaagccaggtaatcagactaagattcaagcgcggatggacgaattgaatacgttgcgagcagccaaacaaccgttggaatggccatcatgcgggagtgtttttaagcgaccaactgggtattttactggtaaactgattcatgatgctggcttacagggccatcgaatcggtggtgctgaagtttctaagaaacacgcgggttttattatcaatgtcgatcacgctacagcgaccgattatatggatatgattcactacgtccagaaagttgtatttgaacggtttggcgtccatcttcagacggaagtccggatcattggtgaagacgtcgttcaaggttagttatgtcaatttaacaaagggggcaaccactagatgccgattatcgaattagtgattttactggcatgtttagtgctgctgtcgaatgtattgagccactatctagtcgcaatcccggtcagtttaattcaagtcgggctgggtctgggagtggctttattattaaatgtacaggtaaaattgcaaacggattggtttatgctcgtctttattgcgcccatgctgtacaacgatggcagagaatttccaaaacaggaattatgggaactacgcggggcaatttttgcgaatgcaatcgtcctcgtctttattaccaccattctcggtggctttttgattcacgtattgatcccaacgattccgctcgctgttggaatcgcgttggcggccattttatcgccaactgatccgattgccgtgcagtcgatctcggaaggggtcaagttacctaaagaaattttgcacttggtcagtggcgaaagcctgattaatgatgcgagtgggttaattgggttcaaatatgcgttagcagcagcggttaccggtacgtttgtactcggtgaagctgttggggatttcttctatattagtctggtcggtttggccgttgggctggcgctgatcacgatcattcaactcattcgggacgtgttacgacgagagggtatcaacgatatcgtgttcaacgtggtgttacagattctcacgccgtttgcaatttatttcattgctgaagaatggttccacgcgtccggtgttgtcgccgttgttgcggccggggtattatcgcacttgcaaaattcacatgaaagtgaagatgcgccggaattacgattagtgacggaacgggtctggaacgtggttgtttacttattgaatgggatcgtcttcctgattcttggtattgaattgccggcagcaacgcaagcaaccattaaaggcgcgcatacaaatacgtttcatgcggtctttgacgttttaatcgtctgggggattttgttactgattcgggttgcttggacatacgcttacatgttgttcaactggttacgacatcacaagaaggccaaacctagtctcagaattgcagcattgtccggtttatcaggtgtgcggggggccattacgatggctggggtcttcacgattccaaccgtggtggcctcgggcaaagcctttccggaacgtgcgctcgtactgttcattgcggctggagtcatcattgtaagtttagttgctgctgcggctattttgccattgatggcggccaaatcactcccctttgttactcggggatccagtccggatgaagacgacgcggtcttggcagacggaacggatgacggtgatgatagcagtgggcaattaccacagttaacatacaagcaagcccgcatttatatcttacagttagcgattcaaaatattgaagaacatcggcggccagctaaccaacgtgcggcctatgatttgatcctggaccagcagtttcagattcggcgtctagaagtggcgtcgcagactgcggatgagttggcgccgatgctgacagatgaattggaacttcgcttagtggcactgaatggtgaacgggcagcagttagagaaatgattgccaataaacaaactagtaagttagctggacaggtctacttgcggcgtgtcgatcggcgcgaacaacgtttcttacaggcgacacatcgacaggggcttccgacactgcgctcattacggttgttgttgacgcgtgcaatgcaagggattcgactatggttagcacctggcgatagcgaagaattacgagtggcgttgttggatattcagcgtgaagcttctaaagctgctattaaagcgttgtcgcagtatctcaaacgggccaacgttgatgagcaacagtttgatcgccaggctctgtatcacttgatcgttcattaccggaatcgcatcgagaatgcgaaaaatgatcacacgttatcacgtgatgattatgaacaacagctgcatggactacgcatcaagagtcttggtgccgaacgtgcgggtgtacagcatttgttagagagtggacaaattagtttacgcaccgcggcaaagttacggcagttcattaattactcggagaacttattgatgctcaatgatattgaggccgatgaagattagttaactttttagattgtaaatcagtagttctaggttataatgatgttagagtagtattgacggtgaatggttaggtttgcaaattaatcattacttaagcggacgaataagggcagccttacagggggaaacatcattatgacagaatcagaaattcatgaacgcttcgtggacacttatatgcatattttaaaatatgtcggggacttcgtttcagtgccgacccggccgtataagataacgtttgaggcctacacggttatgcggatgattgcaacaagtgaggagccgctgacgttggtcaagattgcgaaagagcagcgggtttcacggagtgcgattgcacgtcaaatcaacgtgttattagatttgaagtacattgaacaaaccacgaatacgcatgatcgccgaatcaagtacttatcgttaacacctgctggtcataaagtggaacaggaaatcaccacggcttccgaggaacgttttcatcaatgggtccaagtctatggtgaaaaacgggcaagcgatacgttgcgttatatcaacgatgcggaacaaaaggctaccgaactgggtttcagtggcttcagtgggttgcatgataagcgggggcggcataccgaatatagtgatcctaagacgaagaattagctaatatttagttaataataagaaacaccgtttgaaccgattatcaaatcagttcaaacggtgtttttgattacgctaggacttatccggtgtttgatgaggaaccgttggcatcgtgaatcgccaagccgcgtagatgaggagttgaagtaaccacatcatcaagacaaaagcgagcatctttagcgaccacatttcaactaattgtttcacaatgtactgtggcgtaattagtaagtagatggagtgcagtcggaggaatcggccaacgtagacaccgacactagcaaataggaagagtgcggcacagatgataccacgactagcagggagtcgctggaagtgtaaacgttgggtcagttgctgggcaattcggtcaacgccccaggtaccaatgattgtagacaccatcattggcccaaccaagtaagcgaaatcccgccacatcggtaagtcgaagcgcaagagaccgttgatgccatacggcttcaataggctgaggtggaataaatcagtcattaagtacggtgcattcggatagaaaagcaaccaaatgaccgcaatcagccaaaataatagcgggctacgtcggggtgtcagccaaaaactcagctcgatcgggacataagccaaaattgaattaagtaatagaaaatggaacgcgccgtgcaagtcgactgctgcgaagatgaaaaatccccagaatgtgagtcgcacaaaccaccgctgtaacttagtcatttagtcacttcccttctggtactaattctaacagaaatattaatcaagcaatattaaataacatcaagcttaatatttattcaaaatctagctaaaaagcgcaggctctgctgaaatcgcaccgcgagaaccgggttgccgtgctataatgtgaaagtaaatgattttcatgaggaggagactaatgactttcaattggagcggtttgttgaccttacaaaactttgtccgactccttgacattcttgcggtatggtttgtcatttatgagctgattgtgttgctaaggggcactaaagccgtacaactgtttcgcgggatcgttgtcattgcgattattaaagctgtgagtgttttgattggtctggacacggtatcgtggattatggaccaaattattaactgggcagtcattgcaatggttattatattccagcccgaaattcggcgaggattggagcatttagggcgtggctccatgtttgcgcgtggtaagcgtcagaatgaagatgaagagcggatgattgccgaactggataaggccatccaatatatggctaaacggcgaattggcgctttaatgtcgattaagatggacacgggtcttgaggattatatcgagactgggatcgcattagatgctgatatcaccggcgaattattaattaatatctttattccaaatacgccgttacatgacggtgccgttattattcaagataatcaaatcaaggttgcggcggcgtacttgccattatctgaaagcaatctgattcctaaagagttaggaactcggcaccgtgccgcggtcggaatcagtgaggtaacggatgccctcaccatcgttatttcggaagaaaccggtgaagtgtcgattactaaggacaatgagctgatgcgggggatgacgcgtgaaaattacttacggtatttccgccaagtcttactaacgcctgaggattcaaccaagcaaaacgcgcttcaaaattggtttggacgagttttcggaggaggtccccgaaaatgaaaaaatttatgaatagcaattggtcaatgcggctactagcactgctgtgtgcgttggtgctcttcgcctacgttaattcgttaaagacaacgcataacgccagtattttgacgaatagttcatcgaaaacgacattgacatctaaccgtaaagtgaccattagcgcgcccttagaactgaacgtgaatagtacgaaatattttgtaacgggctatcccgaaaatattaaagttacgatcgaagggccgtctgctttagtcacaactacggctaacacgcagaattttaaagtttatgctaatttatctaagttggcagttgggcggcacagtgtcaaagtcgaagtcgatggcttgaataaagaattgagttatggacttagtcaaaagtacattcatgttaatattcaaccacgacgaacggctacttataaggtcagcgcagacttcaataaagccaacgtagcagatggttatgaagttggatcggcacggctcggaacatcatctgtcaaagttacgggcgccgtcagcgaagttagcaaagtcgcgaaagtcgttgcggtcgttaataccaacaagaatttagagaaatccgtgaaccagcaggctatcattgaagcattagatgccaacggtcaaaatttgaacgttgtcttgacgccttcgaccacgtcggtgtatattcccattacgcaggcgacaacgacgaaagatgtgccaatcgatttgaaagccagtggcaagaccgcggcggacaccagttattcattctcatctgacacgaagtcagtgacggttactggcacgaaggcggcattggcgaagttgaagtctttgccagtcaatgttgatgtgacgaatgttgattcaaccacgactaagacggtcgatgtttcgactagcgatgaggatgggatctcgtcagttagcccaacgtcggtcaaagtaaaaattacagttaaaaatgattaatcatgacacttttgaaatgaggtaaattataatgaaatattttggtactgatggtgttcggggaattgcaaattcaggcttaacacctgaaatggcttttcgtttaggtcgtgctggtggctacgtattgacggaacatgcggaaaacaagagtacgcaaccacgcgttttagttgcacgcgatacccggatttcgggccaaatgctggaagaagccttgattgccggcttgctttcagccggaattgaagttttacgtctcggtgtaattacgacgccaggagtggcctacttagtacggatccaagatgctgacgcgggtgtcatgatctcggcttctcacaatccagttgaagataacgggatcaagttcttcggtggcgacggcttcaagttgtctgatgccaaggaagaagaaatcgaagaattactggatcaaacgaaagacactttaccacggccagcagcggaaggtctggggacagttgctgattttccagagggtaatcttaaatattcacaattcttggaacaaacgattccagatgacttaagcggcattcatttggctgtcgatggtgccaatggttctaccagtaacttagtttcccggatctttgcggatttgaacgtggaatttgatacgatggctacggcaccagatggattgaacatcaacaaaggggtcggctcaacgcatcccgaagcattatctaaattcgtcgttgaaaaaggcgctcaagttggtttagcctttgatggggacggtgatcgttgtatcgcagtcgatgaacttggaaacattattgacggtgacaagattatgtacatctgtggaaaattcctcagtgaacgaggcaagttgaagcaggatacagtcgtcacaacggtcatgagtaacctgggcttatacaaggccttagaagcagctggtttgcacagcaagcagacccaagttggtgaccgctacgttgtcgaagagatgttgaaggacggctataaccttggtggtgaacaatctggtcacgtggtcttcttagactttaatacgacgggtgatggcatgttgactggaattcagttattgcacgtcatgaaggaaacgggtaagaagctttctgaattagccgccgaagtgacgacttacccacaaaagttagtgaatgttaaggttcaagacaagaaagccgctttgaacaatgataagatcaaggcagttatcaaggacgttgaagatgaaatggccggtgatggtcgcgtcttggtacggccttctggaacccaagatttattgcgggtcatggcagaagcgaagaccgacgaactggttagcgcttatgtagatcggatcgtcgatgtggtcaaagctgaagttggcattgaataattaagtgatcagaccgatcatcaaaaaagtcgttactcttagagttgcgacttttttgttgccatgaaacgcacggtcattgctaaatgcggttggcgcggtggcaacgcggttaactggcgactgtcaggagacccagtgcctcccaaaccaatttgaccgcaaaaaagttacaaaaaattcgaaaattcgtgatgcccttgatttataagcgtttgagattggtatacacgctaactaacacgtataccaatataatatattgttgacttttattacatgtaacggtaaagttaacttgtttctaggaaatataccaatcggaggttagactagaccaattgttaattggttaaagcggaatagcgccaggactttagaatctaaagttgacgaggatgacgtttatcgataatcgacgggtgacgtcagggactgcactctacaggtcaattacaaaaaccgactgtgaggttggtgacagatatattgaccacgcagctagaaacaattcaaacagtaaaggaagattaatttatgtgtggaattgttggtgtaacgggtaaagatagtgcagtatcaatcttattgaacggattggaaaagttggaataccggggctatgattcagctggtatctatgtcaatgatcaagatggtcatgactatttagttaaggaaaagggtcggatcgatgacttacgtaaagaagtaggcgaagctgttcatggttcgaccgggattgggcatactcgctgggcgactcacggtgaaccgagtgttgccaatgcgcatcctcaagtttctgcggatggccgcttctacttagttcacaatggcgtgatcgaaaactttgaagacttaaaacagacttatttaagtgacgtgacttttaagtctcaaacagatacagaagtcattgttcaattagtcgatcggtttgtcaccaaggaaggcttgagtacgttggccgctttccgtaagacgttagggctactcggccattcttcatatgggttcttactgatggataaggaagatcctgacaccttatacgtcgcaaagaataagagtccattattaattggggtcggcgaaggctttaacgtggtctgctcagatagtttagcgatgttagaccaaacgaaagatttcttggaattacatgatggcgaaatcgtggtcgttaaacctgatgaaattaaaatcacgaaccaggccggtgaaccagttgaacggaagccattccatgtcgacattgacgcagctcaagctgacaagggaacttatccattctacatgttaaaagaaatcgatgaacaaccgaatgtgatgcggaagctgtcccaagtttatcttaatgatgcgggtgatccaatcatcaatgatgacttgttaacagctcttaaagcagccgatcgactatacattgtggctgctgggactagttatcatgctggtctggttggtgcaaagttatttgaatcgttggctaacgtgccaactgaagtgcacgtttcttcagaatttgcatacaaccaaccattattatcagcacatccattcttcatcttcttgacccagtctggtgaaactgctgatagtcgtgaagtgttattgaatgtgaacgatcaacatttcccaagcttgaccatcacgaacgtgccaaactcaacgctatcgcgcgaagcaacgtacacgttgttattgcatgccggcccagaaattgcggttgcttcaaccaaagcctataccgcacagattgccttacaagccatcttagctaaggcgttaggtgtggccgttgaccaaccagctgcaacagctttcgacgtaaaacagcagttggcgttagtcgctaatgggatgcaaagcttagttgatgaaaaggctacttttgaaaagattgctaagagtgccttattgaatacgccaaacgccttttatattggtcggggactggattacgccgtctcattagaaacggccttgaaactcaaggaaatctcttacgttcaagctgaaggtttcgcatctggtgaattaaagcacggtacgattgctttgattgaaaaggataccccagtgattgggattattacgcaaaagaataccgctgggttgacccgctccaacttacaagaagttgctgcacggggagctaagacagttactatcgtcaccgatagtttagctaaagatggtgacacggttatcttgccaacggttgatgaacgattaacggctttgcttagtgttgttcctggtcagttattggcctactatacgagcttaaacaagggcttagatgtggacaaaccacggaaccttgccaagagtgtgaccgttgaataatttaaagtaagtgtgtgggcaccaagaaacgtcaccgttcgattacggtggcgttttttgattgcccacaaagcttttgcataatttttaactgctgatattcataaggctattgtgaaagttgacgatcttttggtatgataaagtaagcggttgcgataacacaactaaataattagactattggggatgaatggtcatgctgaaatataaatattttgcacagccaattaataaccttggaaccaaccgaacaatcttgtatgagttattattacgacagtgggatgagaggcaacaaacttggcgaataccagcgacctttgaaatagcgccaacagaattgattcaattgctggattgcgctattcaagaattaaataaccatcatgtttccatcaatttaacggcgcgtcagtttgctaatcctgactttcaagttgcaattagtcactatgtgcagacgcatttgttaccacgagaactaactgttgagctagttgcgacacctgagctaagtgagttacagcaattaagtgttgggtaccgggcagctggtatattacttgcttttgatgatgttggttctgataacctattccaacagatcaaaatgatgttgccatatgtgaatacggttaaattcgcgttacaaaatatgcgaccgctggggaccccaactacggatgcaattgtttcgacgctcaaattttggtttgataaggcggaggaacagcaaatgctatttacctttgaaggcattgaatcagcggctgatgttcaactggctaatcatctaggcattacgcgagggcaaggatattattttgccaaaccgcaactacccgcgacatttatggcatgacaatagtggtatgctacaatagtattcgtagcaatgtaactgagtgtcatgttgatgtttaatcggctgaatcacatgacgagacgaggccgattttgttagtaaatgataaaagatggggtggctacttgtggcaatcaatttaattgcaactgacttgaatggaacattattgcatcaagatcagcgttttgacaaagaacggtttaaacgggttttggcgcagttacgggcgataaacgtttccctagtactttcgtccggtaaccaatatgcccatcttagacagttatttaaagatgttatggcggataatcttatcgttgttgctgaaaatggggcgtcgatttatgcccaagaccgcttgatctttgatggcagtctttcagcagaccagcaacgaaagtttgtgactgttgatcgttaccagccactattcaaagacgcatacgtaatcttagttggtagccatgggtcgtatactgagttaggagcacctgataagttagtagcgatggcccgtcagttttatgatcatttacacttggttgcggatctggccactgttgatgataccgttaaaaaaatcagtatctcaacgtcaccggaccaggctgctgatctggtggcacgagctaatgattattttgatggcgagttacgtgcgcatgatagtgggtatggcgtcgtagatttggttgatcagcgggtcggaaaattaccagcaattcaattcttggcgactaaacttggtttaactgcagctaatgtgatggccttcggtgatggggcgaatgatgtcccattattgcgatatgcagcgcacagttatgcgatgtgcaacgcaccggcggacattcaagccgcagcaaaacacgtgacggccctggataatgaacatgatggggtattagcaaccattgaacaagagttgttaaataattaaaagcctataactagtcagtaaaaagctgagctatcgaatgaacatcgttattcgatagctcagctttttgggtcctattaaagtgattgattagggtagaagaattgatgaatgccataagtgttgagcgaaactaaacgctgctttagttcagccaaagttagtcctaaatcaccattaaaatagagccggaaaaaggttaaattgttgtggatcaaaaagcttgaacagaccttagcatcgattgcagataaatgatagtttgtttgaatcgtcgttgtaagccctgctaccacggcagcgtggattttccgagacaaaaaactgtaatcatcattcaacaaaatgactcggtgaaaagcttcagattggcgaaaataggtcactaagcgatcaaagattaagccgggttggctaatgtttttcttgaaaccttgcgggtcaatgagtgctagaatcttatcagcaccttcttgaacgaacgtttccgctaaatcgtcaatggaatcgaaatgtaaatagaaagttttgcggttgatattagcgacacttgtgagctccttaacagtaatatcacgatagcgcggatactttaaagcaagcgtccgaaaagcctctttcagcgcagtctgggtgcgctgaacacgtaagtcagtagctggcataatctgattctccttattaattacatttgatggggtggtcattattaaaccgccgctaaatgtactagtcgttaagccacatgtgggtattattatcataatagcacttattttgatagttaactcgtcctgagtcatgacagattaactcgcgcaacgtgcataatagcatatgcgcctagtaggtaaatggtaatgaggccatgtccgtcgactaaaatgggttaggagattttcgttcagtcaatggtatggtgtaacgcattattagtgagtcaaaaaagctcccagtagtttgcattctgggaggtcaatttgaatcattcttgagtggttagacgtcgtaaatattagaaaaacgataggccgtttggtaggttacaggaatattaggttcgataatgatactgccaaattccttgtggtgaatagcatccggtaatttttgtgcttgcagggaaagaccaagttgagaacgcatcggtttaccgccattgagtcgataacgatcatcacggtaattagttgcactggaaaccacgactgccggagcgttcgttcgcatcgtgactttgcgtccactgatgcgatctagtaattctacttgtggatatggggtgtcgtttaagacgaagccgtgatggagcccgcccttgatgttagcaatctggggcccaacctcgactgggtcacgaaaatcaaatggggtgtcggtgacccatggcaacttaccagttggaataccatgtttgtttaacgcggcgtactcgtctgcattgattttaagaacatggtggtcaatgaggcgttccgcatccccacttagattgaagtaggtatggttgctggggttgaataaggttgttttatcacttttaccagtgtagctaatagtaaatttaccgtcgttatctaatacgaaattagccgtgatcgtcattgtcccgggatagccgttctcaccgtccaaggtaatatattgcatgacgagtccaacttgatcactagtgtgcagtttacgttctaaaaaccatggttcaaatgaaatttgaggcatattaccaccgtttagatgattttcgcccgcattttgagttaagtcatactgccgccaccgggcatttttgatgatccccgcaacccgagcgatggttgcaccgaaaaaagattgataggtgatgtagtcggcgccgtcgtcaaatcccaagacaatatttgcaaaattaccatctttatcatgggttttgatcgcggtgactgtggcgccccagtccataatagtgacgctcatatgatgattgttcactaatgtataataattaatcccgttcccctgatgctcgattattttcataatgccctcactcccatagctgcctgacatgttaccgcctacttttagtatatttcattcttaaagggaatgcgaataataacccagcaagtgttaatgcgagagtgacagggttagttgctagtgaggtcaatttaaataaccagtgtaaataattataattgattgttgataataattaaaattatctaggttgagaagtttattttaaatcttggtaattgtgaatggtaccaatctattaaataaggtgaattaattaactttgtgcaagtaaagacggcaatttagtggcgaacatggctggctgagggtgttagaaaaagattaatgagtaaatagaaataatttatctatttattttggctaactgttgacaacgcttacaatatcgcttattcttagtttgtaaggtatttaattaccttctaatcaattctctttctctcttatgccgaccactatctgcttggatagtggtttttttgagtgaaattagcgaatttatggcggactagatgaagataaggctctcttgtaatttttgaagattgatgtttactcagaaaaaggagtgctcggctgatggtagcattttggggctgactgagttagtttagtgttcatcaagtacaggtgattaggcataccaagcctgatcacctggcaattactggtcagttttgacacgactgccaaccccgcttatactaaaatgtgaagtgagggattgcagttgaaaaaccatgaagtattagacttaattcaagaaataacacgtaatgatgggacctcatacatggagatcggaaacatgttgatgaatggccgcgctgagttagcagctgaacgtggttttattaagcaagtgcggatattacaactaaacattccgcattccacgcatgttgccaagtatgagcaatatattaatgaaacatttacgattcccgatgaaacgatggatcattgggaagaatggacaaaaacacctgacatgcaagctgaggtcgatctgattttgaaagaaaatcatattggctaaaagctgttagccaaagtctagcgcaggagtgtgggtttatcaaacggcggttgtttttttagtaggcgctggctcaaaagttgaactttcagaatgtcaattctctaagctcagcttttttgtttggatcatgaaattgactgattgtggtgatttaattgcgggtgcgtaatgggggaaaataacttacaaacgttagtatcagtgttattatcaataagcatgtttaaggaggctcgttattaaatgaagaatggggcattgctacaatttattcaaagtcatttccagacccgttttcgttttcgtaacgcgtttgagacccaattgactgttcagattttaagtcgattgattggcgaacatccggaaagtctgttattgactcggcgagatgttgaagcgttggtaggctgctcattggacgcgccggcactacagcgagaatattttccgcagcgtgcgatgacactgttagaaacggcgttagatgagctggttacgttaagtgttatcatacaccaggatcagggcaggacccgttatcccttatttcggagcgtacagcttgatcaagtgtgtcaacgaattgtgtttaacttgaacctggacgtgttgccacaattaacggactggtcacgggaattacaacaagaacaggagcgattttaagtgacaaagagtgtgattgaaaccttacaggaccatcgaacgcggcgacaatttaccactgaaccaattagtgatgcgcaattcgcgcaaatcatcacaacggcacaacaaatgccgactagccaatatttacaggcatacagtttgattgagatcactcagcctgcactacggcaacaattggccacgattacgatgatgccaacggttggtgaaaacggccgtttattagttgtggttgcggaccaacaccgcaacgtcaagctagcaccgggcgcaacgacgcgtcgggcactgagtgaatttgaccgctttgctggtagtattgaagatgccacgctgattacagcggcgatggtgatggtcgctgaaagcatgggtcttggtagcgttgtacttggatcaattaacaacgacacgcaggcggtgattgacgcactacacttgccggacttgacgttacccgtctttgggttgcagttagggcacccagcggatgttcctgaaaagaaacctcgattagggttgcccgctgtgttgtttcaagatacctatgctgagcctgcgagttatcaggcggagttggaccggtttgatggcgttttgaatcagtattatcaacatcggagtagtcacgcccgtacggaacacttagcgcacatgacgcaggaagcgacccactcagcggccaaacggcgagagtttttgacaatcgctaggcagcagggctttttgccggaattagaccaataatcgttaccataacactaataattagaatggctgaacgaaaaataaccgttaatgtaacgctcccatgtcgctattagctgacatgggagattttttggtacctgggaggacgaatcttaacattaaaataagattaaatattgctatttttactaattataatataattaattctgagacgatgtttactaagcaggcccgggctgcgttgcagattcgagtgaaagctgagtcgatccttattctgatgtgtgatagtaacattgttgcaaggcttgaaaggggcggataatgtgatcaatgccaacttcagaaaactcgtcttagggcgagcagtgggtaacgctggtgacagcatctacatgattgccatgaactggttcattctccaattgaccaacagtgcgttgtggatcggcatcatgaatgtggctattgttttaccgggcgtgttgttgtttctgtttggtgacagtatcgaccgacattctaaacgccgattattagtcgcggttgaattttcacagttagtgatcgtggtcatgctaattggattagttgcgttacatattaagttgccaggtatctatgtcgggctggtattcgtcgcggccctttttggatcactagcttatccgattcaagatacattagtaccgctgctcgttgagccagaccagctagttcaagcacaagcggacatgtcaattgcctacaagggaacggattacgtgttcaacgcgctgtctggatttttgatcagcctctgctcagtgctcggtgttttaatcatggatgcagccacgtttgtcgttaccgttgccacttttaggcggatcaaactcgctgaaccccgtcagcaacacacgcgggaaaagtccttgtatctcaaccagattttggttggtttcaaaattatcagcactgatccgctgctgcgtttattgacgtttgcgagcgtcgtcatgaatttcttctttggcggtttgaatacgtacgtcgttttatttgggcggcatttcggtgactcgatctactacggtattttggagtcgatgtcagccgttggaatattattagggatgacggtagtctactgacagttaaaaaagttgaccgttcggcagtcttacctcatcggcaactttgggcgcgcgttattcatgatcttgacagtagtgtcgtacaaccagttctggctgtttgccatcatttacttactgagctttgtctttcaaggactgacgcaagtatttgagacaccgatgattcaagcgatggtcggttcagaccaactcgggaaggtaatgacctgcttttatacgctggtttccgtgaccttaccgctgggttcgctagcgttttctttcctagctgaccgctttgatttacggctattcttattactatttgccctcttttatgccggcatattcctgctatttctagccagtcacgccttcaaaaaagtagacgaactacaattatcataaaccccacgcgatattcattaatctgtcatcaatcatgattaaaacgtgccaagtttttaagttcaaaagcaaccagcttagacccgctggaaaaagttcaggttagcgtaaacttgcttagttagtgtgtcctatgccgacttccaggcatttctgccaattgccggaacgtggtgggcacagatttaagccgaagcccacgtcttaaatactggcctttcactaaccaagcacaagacgcttgctaagtgaaatttcaccactgggcattgtcagaaacgccttccagtcgggacagtgttcgaatggcagacggagatgtacccaacttttattggactcatcattgttcttcataaacagtaattttgtcgagcaactgtcaggcagaaaatgacattgtgatagcttactatttcggaatcaccatagtagtaatcgaacgtttcaacaaagtggttagggtaaccctaacgtctcgtttaaagttcctgtatcaaaatagtcaacgataaattgtgctaagttaagtggccgttcatcagccattcgagcggcttcccgaaacgtgttcggtgccactaaagcctgtgcttgctacgccaacggactaatgccaaaaccgcattaatccgttggctaggcaatgctcggcttcaactcgtggccccgcacactcttgagactggagggactgggtgacaatgctcagtagccaaattattcttagtcggaagtgatttccttccggcttagaataagactcgtatttgagatgacgcgggttgggcgttagctcaaatcgatgtcggcttacgttacagcaattgtcacccagccccggaggtcggaataggacgatcattgctgacgaacagaaatccacctaatcggcacgttttaatcatgaaaagcaacaaacacagtgcggattatcggatagataagaatggcagtgatggattcaaggaaaatagtgctgaactaaaaacgtcgtgactgacttcagtcgcggcgtttttgactagaaatttagtttagttggtacttgattgggcgtcgattggggtgtgcttgaatagttgggctgctttgacggcggcttgccagccttggtaaaggttcgcacgttggggcgcggccattcggggttggaagacattgccggtttggtggattgatttgagttcgtccaaatcttgccagtatcccacggctaggccggctaagaatgcagcaccgagtgcggtcgtttcgaggtcagcggcccggatgatcttgacgtttgagatgtcggcttgaaattgcatcagccagttgttgcgggctgcaccgccgtcgaccatgagtgtgggcatggtgatgttggcgtcgtttttcatcgtatcaatgacgtcgcgggactggtaggccagtgactgtagcgtggctttaacaaaatcagcccgggtggtcccgcgggttaagccaaagacggctccacgggtctcggaatcccagtaaggtgcgcccaatccggtaaaggcgggaactacgtaaacttcgttgtgattatgggactgttgagcaagactttcggattctggtgctgattcgatcagttgcatgccatcgcgtaaccattgcagggccgaacccgctacgaagatggagccttcaagcgcgtaattgatgttgccatcaagcccgtaagcgatggtcgttaaaaggttgtggtcggataattgcggttgctcgcccagattcatgacggtaaaggcaccggttccataagtatttttgaccatgccaggttcaaaggccatctgaccaaatagtgcggcttgttggtcgccggccatcccgctgattggaatttggctaccataaagcaagtagtccttagtcgtgccatagatctcagagttggaccgtacttctgggagcatcgcagcaggaatgttcagtaggttcagaatcgtttggtcccattgtaagtcgtgaatgttgaataacatggtgcgactggcgttggtgtagtcggtgacgtgggtctcgccaccagtcaatttccagacgagccaagtatcaatagtcccgaaaagaagttcgccgcgttccgcgcgcttttgggcaccatcaacgtggtctaagatccagcgaattttcgttgctgagaagtaggcgtcggtcactaggccggtgtgccggtgaatcagatcgcccataccatcagcgatgagttgctcagctaacggtgcagtttgccgggactgccaaacaatggcgttataaatgggtagaccggtttgcttgtcccagacaacggtagtctcacgttgattggtgatcccgatggcttcgatttgattaggtttaatattagcgtcaattaagacgttagcgatcgttgaggaaaccgcgttccagatttcagtagcgtcgtgttcgacccaccccggttgcggaaagtattgtggaaactccttttgggcgtcggcaactttttgaccggcgtgattaaaaataatggtgcgggtactcgtggtcccctcgtcaatggccatgatatatttggctgacataacttgttcctccgaagattgtaatcaataacatcatctttgatgctagcatggatagttggacttgtgaataaatataaaaaacttaatatataaactggcatcccatgaagtatcgagaattaatcatcgtacccataccaatttgctgaaatgaggaaagggttaccatgcttgttttgataatattacttttgtacaacggttagtaacggcgttgaactaagattaatgaatatttgaaatgtagaccaatcggcatataatggggactcaaatcggtgtgaaatggaggattcctagtatgcaaaaacgacgcttttttcttaaaggctctgctgccgaggttgcttggctcaatcggcaggcggcgtggggctatcaattgacggcgattcacggtctgagttatcagtttaaagaagtcccacaagcacgccagctgattgccgaatacatgccacagacgacgttacaagctatgacgacggtcttccaaccacttactagttatacgtttcatgatgatatggcggtggtttattcaactgtggcccctaaacaacgagtggtcaacaatgatcaacaataccgcttagcagtgtatcgacatgctcgcgatgtcgccttgaactggctcaatggctgggtattggtagtctggctcatgatgagtgcgacgattgtgattagctcgcaattgcaagcaacgccactattaacccggttgttattacttgggttggcacttggtgcgggggtgatggtggcaggtattatcgttggtgttcggacagcgattcgttgtcaccgggaagtgtgtcgcttgatccgtatcacaggagacgatcacgagacgtggaagccgacttttcacgtgttgtttaagcatcaacacgccgctcccgatacgacttgctgggatgatttaggtagctggcaactggcactgcataatcagcgtggggattactactttgagttaaaaacgacattgagtgaattagaaatcactaatacactggcacaacgcttttcaaaacaggacttttccgtggtatcgtggttaggtttgtacgttgtttgaggtggatatcatattaattatgtgaatttagtgtgacttttttttaaaaggacttgttttttatcataaaagcgtgtataaatacagacataatcattgcccggtagttcagcggtagaataattgactgttaatcaagaggtcgctggttcgatcccagcccgggcagttggtcatgtttagttaagtagcggtatctcgtgaggtaccgcttttgtcggcacaagtacagaatagcgctggcatttgatgggtaattggctggcagaactttagaaataattaactaaaaaagttctgacaaaccttgactattcttgactaaaaccgtatacttactatattaaagtaagtggtgtaaagtcacttgctgaaacttaggaggaattcatcgtgacagtaaacttatattattcaacgtccagcaagtctagtcgtagtgcacgagcatggttagttgagaataacattccatttaatgaacgcgacattattgctaatcctctggatcgcgatgaattgaaacaaatcctccggctcactgaaaatggcttcgaggacatcgtttcaacgcgttctaaggctttcaaagcattacacattgatttgtcggacttaggcttcaatcagttattggacctattagttgaaaaaccacaattactcaagcggccaatcatttatgatggtcggcggttacaaatcggttataacgaagaggacattcgggcatttttgccacgttcggtacgtaagtctgaattacgtgaaattcaacaaaaactttatgacgatgatcaacaagcagttggttaatcggatttagcgtttgagacgaaagcggcccatcaagaattgtgttgatattcttgatggggcgtttttttgtcgaaagaacaatatcagccagccaccagggcgcgttaggttgcgtgtcttcttaacagcgtatcgcagtgtagggcgttattttacttgccgattaccgcccgttacctttgctgagtaagcagattccttggtataatcagttggtttgtgtacaatgtaaaaaggcttaaaggaaacggagattttaacataatgagtgaacaagaccaggctgcctgggcgatccaggcactcgccgctttgaagacggctgataatcaagttgttgtggagagtatcattaaggtcatcgatgaccaacaggctgagattgagagtctacggggttcaatggaaggccaattatggagtccaactagctggcatcaagatcagcaagcgcaacgtgccgcgcatgaggacaagtccacaactaaccattaaaattgagaagacgccacaaaagacggttgttagactattattggtctaacaaccgtctttttgtcactgcgtttgtgaatttaagttgagcgccatgccgtgatttacggcgcagtcgagcattaagcagccagcaagggggtgcaagcttcaggatacagttgtgatcagtaatccgtgacgcttgtcttgcggtgctgggccacaaattggaaggtagctgccacgagtccgccaatcaggatacccgttgcgttggcaatgacgtcgttgatatcgctactgcgattgatcagccaatgttgtgacatgaaatattgcagactttcaatgctggcacccactaacaagcccgttaatccgaggcccaatagtgggtagtgatgaaagtggcgtttaattccccagcctaagggaatcgtcagaatgatattttcgataaagcccagcccgtgaagatacaaccgtgataggttcacttggccgacaccagctggcatcacgtagatggcagttccgtcgaatgacagcggggtaaacaaaatcacactaaggccaaataagtaacctaagccgagtagctgccgcgtccgggcttgtggctggcgaacgtggacaagaatcaccaaacaacttagtgttgcaactattaaaataattctgaacggttcccaacgcatgcacaccactcctcggtttggattaactgtatcttaccgtaaactcagtggtcagaagtaaagaagacgtgaagcttaatgaagcctttaacggcttaaccaaatcccaagtaaatcagtggttagatgaccgtgattgatgttggtcgtcagccatattcgcaattggtttcgtagtcagcgctaaagcagctacaatcataatgataattagactgaaccagagtgcgatctgggtgccgagggtggtttgcatcgtactcgaagcactcggtgccatgcgggtgcccaatgtaatcaagacggccataatggcggtaccgagcgaaccagaatactgttgtagggtgttgaaaagcgcgttgccatcgcccattagttggggcggcaattgttgtaaaccatacgtcagggcattgttaaataagcaactgaacccaatttgaaagccaacaaataagccaatgatcaagccgaccgagagatgctgggctaaccctgcgagacttagtgttgccaacagtaaaaagccactaccaatttggaatggtcgccgaatgccgcgacggtccatcaatttaccagccaaaggtgatagtattgctgaacataagcttcctgctaatagcattaagcccgacactaacgcatttttacccaaagcgagttgtgcaaaattagggagcagaaaggtcagtccaatctgaatgaattgaatgaagaagtaaatgagaagcgcccgggtaaagtcaccctgttggaagacggccaggttgattagtgggtgcgtggttcgggttgccgaacgggtaaaagtcagtacggcgagtaccgctaataacagtggtaaccagacgaatactaagcttaagccatgtgtactaaggttattgacgctaaaaatcagcaggatgagtgccgcgacgactagcccgaattggcataaggggaacggacgtgaccgtggtgcctgcgtttggcgaatagttttggccgttatcagccaagcaatcagaccaaacggtagggtaatgccgaaaattaagcgccaggataatagttgtgtcactaagccgccatatgttggtccgagtgaaggggccaatgcgatcaacattccagcggtccccgtaaaacgaccctgagcagtgaaagggaccagggtcatgatttgcgcaaatactaatggtaatgccaatccagttccgatggcttgaatgattcgaccgaatagtagtaaccagagctgtggcgcgactgtacataataaaccgccaagaacgaaaccagccccgccaacgttaataattgtccgccaacggaagcgttgttgaataaacgccgtaataaccatggtagcggctacggcgagtaaataggcagtggtgacccattgaaccgttgctagagtggtgtggaattggtgcatcaaggtcggaaaggtaacgttcattgatgtttcaactaaaataccgcaaaaagccagactggcggtgccaaaaattgcaaccttcgtttgggttgggatgacaggtgttgttgtagacaaaataaaacctccattgatcaaggccagctcgtttcgtatgtgaaacgacgcttttcttgaccaacggagattccgttgtaaagatatacaagcatcaaagacgaccttgatgaatttattaatgttttaatcctagcatactactgataaaaatgtcagtccgatttttttattcgctgactttagcgctttgttcagctaaagcagtcaggtgctcgaataggatgccttcacgcagtccattttgagagaaaatcatccggtcagaatctaaaaagcgcatcagactaatggcaggaatcatcccaccaacaataatatcagcccggtcctttgctaatccaggaatagccgcgcgaccagctgcatcctggctaatgacagtattgaatgtgtcatagatggcgttgtcacgtagccgataaccgtgaatatcttcaaagttgaggatattgcatttgcgccggttaattttggctaacgttcggttgctaccacccaaacagacgagtggtaagttgagaccgtttcgcaaccaccagacgctattaaaaattttatcaacgaaagtcatcgttttaaataattgactagcggtaacttggtcgttgaggccgaacttttcggataaactgaccgcgccgattggcagactgattaggtccttggcttggccgtttacgataaggacgagttcgcagctaccgccaccagtatcgaccatgacgcagttagtcgttggaagcgtattgactacccctaagtaatcgtaataggcctcggttgttccaggaatcacttcgatatctaggccaacatcatttttaacgcgtttgagaaatttcttttggttgctggcctttcgcgttgcggcggtcgccacggccttgatagttaagttaggtaagtctttgtagacggcagcaaatgactttagcgctgcaatcgtgcggtcaatggcctcggcttgaagggtcggcgtatccgtggcgttttcattctcggataaacgcaccatttccttgagtcggtgagtgaccgcataactaccgtcttcctgaatctgtgtaattgtcattcgacatgaattggaacctaagtcaatgaccgcaaagttttccatcgctaatcatcctctctatcaagatctgaagcatccggctcattcttgggactcatcatcggaatgaactggtgcgcgttgctagtgggcgtagtatcgccgtgatcagccttgactgcttgctcggcttcgcgaatgaattcggcctgggagtccaaaacctctaagccgcgcccatccacacgggcgtacgtattatctggttgcaaaatgcgcgttttgaccgtgtcagcccacattgtttcaaaaattgtcatcgcacggtgactgatttcaggttggagtagtgggaacaataattcgacccggcgatttaggttacgggtcatcatatccgcactggataagtaaatttgtggttcaccgtcgttgctaaagtagtatatacgactgtgctccagaaggcgaccaatgatcgagtggacctcgatgttatccgagatgcctttgatgcctgttcgtaaacaacaaattccccgaatgatcagttggatcttaacaccggcgtgagaagcttcgtagagtttactaataatctgcggatcggataatgagttcatcttcattttgacaactgcgggctgaccagctttggcaatggcaatctcatcgtctagcttttcgttgataaagtcgcggatgccatctggtgagatgtgcaatttgtggaaatacggtggttcagaatagccagataacatgttaaagatgttggaagcatcgattcccatgtctgtatcagcggtgaagagccccatgtccgtgtagaaatgggcggtgacatcgttataattcccagttcccatgtgcatgtagcgcttgataccttcgttttctcgccgaacaacgagggcaagcttacagtgtgtcttaagcccgatcagaccgtagatcacgtgacaacccatttcttcaagctttttcgcccagtgaacgttattttcttcatcaaaacgggccttaacttcaacgagaacggttacttgtttgccgttttgggcagcctgcccgagatacttgataatcggtgaatcagctgatacgcgatacagcgtcatcttaatggctaacacgtcctcatcttctgcagcttcatggataaagtccacaacgggtttgaaatcatcgtacggatattgcattaaaatgtcgtgatccttgataagatcaaagatggattgttcgcggtacttcgcgggatagtaggcgtggtattttggataattcaagtcttcgtggccctgcacagctttcaccagcttggataagaaggtcaagttgaggggaccgttgatgacgtataacgcactttcgttaatcccaagggctttagcgagtcgcgtacgttgatgtttgctcatactcttttcgacttctaagcgcatgaccttaccgcgttcacgcatctttaattgtttttgaacttcctttaataagtccgaggtatcctcttcggcgacatctaagtccaaatcccgcatgacgcggtaacagctcgtttccttgaccgtgtagttgataaatagtgagccgacaaaggctttgataatttcctcaatcagaataaactggttcggtgcgcctggcaaaacgaccacgcgaggaaagacgtccggcacttgaacggtggcaaacttgcggtccttcttattcccatttttataaatccgtaaggcgatgttgagtgtattattcccaatgaacgggaatgggcgtgaagagtcgtctgccatcggtgttaaagccgggtacagctcatcatcaaagtagttcttaacaaaggcgtgttgttcctcgtttagatcagccatcgacaagagatgaatcgcgtgctgttccagcaatggcaaaagcgagcggtttaatgtattgtattgacgcttgaccatctcgtgggctttatcactgattgcactgacttgatcagcagcggtcagtcccgcgggatccggtttagtgtaattgactgacatcaatttacgtaatgatgcgacccggaccgtgaagaattcgtcaagattactctgtgtgatcccgagaaaacggacacgttctagcaaggggttatccttatcacgtgcttcatcaaggacacgatagttaaaatcaagccagctgagttcacggtttgtataataactttctttataataattcatttaacgtaccccccgtagtttaatcactggtgttaaaccaaagacttctttaaagaattccgctttttgtgcgaatacccaattttctaagaagaggtcatcatgagcaaagcaagtaatgatgacccgtggattgcgaattgaaacggaaattttatcaattttttgtttgcgaccgtcatccaaagcgtccgcaattctcaagatggcggatagtttggagactaataagcgttgttcgacttgtaagtgtccaaaatggcgaatgtcttttgatggtgtttgcgcgctatggtagcgtgaaatcagggcgaccattcgtttttcggtatcggttaatcccatgagttcagtggcctgcaagatatagtccgaatgtaagtaatgttggtgcgggtcaatgtagctcccaacgtcgtgcacgatggcggcgacttgtaagagtaagcgctcgcgtttgcctaagtggtgtagcggtttaagctggtcgaataggtgcagtgagaatttggtgaccaagtcgcgatgcttaggttcaacgttgtacctgtccgcaatgttcttagctgctgttacgatttgatcattaaagttatatttcttatagcccaacttaatggcttcttgaataattaacccatccagcacggtcacgttgccaagccagattttctcagcattagtgagttgtagtaactcgttaataagtagtaattcgggcacgattaggcgcacgtcttcttcatcaacttcgtatttatccattaaatactggtcagaagcgtttaacacgtcctcatataaagcttgaaaatctgctttgctgagttcctccacgccagcttttgattgttgttggcgaaagagggtggcaaacggcgcgacgccgagcatgacgacgttactaggctgatctcttcgcccgggcaagaagcgaccaaagtcaacgatttgactcgaaatataatcatccaaaacttcgacatagttaggcacgctcgattgcaaatcttcaagaacttccgcgattcgaactggtcctaaacggaggctacgggagaagacaaagttactctgatcgtagtgcgaaataccgacactaccagagttgattcctaataagtaggtcggcttcgtgatcgtttgcttgaatcgtggaaagtgtaccgcaactgcgactgaacgcaggtaggtttcctgactactagataaccagtcgatcttgagcccagtccggacaagtaattggtcttgaatatagtcggcattgttagcggatgacaaggaccacgacccccataaatggtagtccttaacgccgtaatcgttcatgatctgaacaaaaccactcagtgcctgtgcggcttgttccactgaatcataatcgatcgtatgctgatcataaatatcctcaccaagtgaaacgtcggaacgaactcgttctacttggcgtaatgtgcgtaaattgacaatcgacaattcaatactctgaacgttaatcatcataattccaaataattttgctgccatggcgatcccccatttttatgatttcctgacccccaataaggttaaagtcatgtatttaatttaagtttaacacaggttggggttagttaaattagtattttagtagtgaaacagttagcgattacttttagtttttatacgaaagttaagcgtaattaaggccatcattaactttgtatgaatcttactagttaggtggttgatgtggtgattaccccggtttcagcggtagcgaacgctaacttaacttggcacgtttgatccaagataccaaaaaggcgtggctcagccgtaacgagtatgcctgaaccacgctagttgatattataagatttcgtgattatcgataattagtttgttcagatgtttttcaactcgtttatcagctggtggcagctgcatgtaatcaccatacatccgggtcaaaatggtgtcatacgcactgggaatcttaacttggatatcttcgaatggaacggtcgttagctcggtcaattcctgataggtcataatttccttttcataatcgtattgagacgccagatttttgtaagttcgggagtctgactgctcgtacaggcgcatgtattcctcacgttccagcttatagcgattgacttcagctaattgctgaggtgtgtgtttcgtaatcaagttgcgcagtggtgttttgacaaagcggtaattcaatttgagcaggatcgcagcgtccgctaatttgtaatgtaacatctgtgaacgacgtaaggcttcgtcatctggaatcttatcaaacggaaagatgtcaacgaacacgcctttaaacgcattattgacgttgttgcgttcttcaatgtaagtatttacgtctaatagcttcatataactgagtgcatagtccggatctgaggcgccggtttgtaggaaaaacttgtttggatcaagatggtggttggcgacggcgataaagcgctggtagtcatgacggcgcattccaatgtcgatgtcatcgtcccacggaataaatccgtgatgacgaatagcaccgagtaaagaaccaccgatcaaaaagtaatcgatattttcagcctcacagattgcgatgacggtacgcatcaagcgcaattcaacttggtgtaagggtgtcaggggcatggtctcgtctcctttttacgtaagcgtttcaactactttcatcatacactttgttgcacaaaattgttagggaggatgcttaacgttggaatttacgggtaatttcatgcaaaacagttaaaggcgtgttatatttggtcaaaagttaatgaagtgatggtgatcgcgatgaacagtgacgaattaagcaaacttctcaatgattattttgaagcatatcaaaatacaaccaaaattatgatggacttagtggcttggcctttaagtcaaaataaactgtcatttgaacaatttttaatattgcggcgcattgccacgactgatgaagtgacactcaatgatattgcaattcagcgacaagtaacgcgaagcgcgatttcacggcaagtcaaatcattgttaatgcaacactatgtttttcaggtgccagatccgcgtgatcggcggcggctctacttacatttaacagaacggggacaacaagtcgaacggattgtcgaccaagccattacccagcattttgatcactgggtcaaccagttgggcgcaccacagattgatcaagtgctcaagatgatggggacctttagccagcaggtcacggacctgggtgagccacagtcacaccccgttctacactaggatgtacatgggactaaccactaaattagtattgatgagcaactattttggtcgctagtcaaaaacagacttcttaggaattgtcacaattcttaagaagtctgttttgttacgaatacccattgaataaaaacacttgtactaaagtagggtcgtttcatagaaagtaagcactcaaatgggcgtacttgcttcactgtgatacgtgtagcgctcaatgcttgaagaaattatggtaaaccccttcgcaagcttcaagaaacatcccaatagccattaagtacatggctaacatgttctgcattgtgaagaccaagtagagtaggacggcgtagaggattaaaaagaagattgccgtaattttggaaccagccatttaaatcacacctttgtatggagaatcgtgacgcgttgtttgcctgagggtcgtgaggaccaagagcggttttaaggcaatgaacacgctttatcaatttcattctaccgcaggctcattaaaattaaaaatcgcaattaaatagattcaaaattatttagcgttcggttattgcttttaaataaacaaaatgatacgattaaatacgttaaaagaacgctaaaacacgaacgtttacaattgtgcaattataatttaggcgaatatttggagggaatcatgaataaaattgcggcatattttaatttttcagaattgaaaacgtcaatgcgaaccgaagtgctggctggcttgaccacgtttgtttcgatggcatacatcctatttgttaatccgagcgtcctcggggcttcggggatggataagggcgccgtcttcaccgcgacggccttagcgtcagcgttaggctgtttattgatggggttagttgctaagtacccgatagcaattgcaccaggattaggcgttaacgcgttctttacttattccgtagttatcggaatgggcattaaatggcaaactgctctggctggggtgttcgttgcagccgtgatttttatcttgattacgatttttaagctccgggaaatgattattgatgcgattccgcgggatatgaagttagcaatttcggcggggatcgggttcttcattgcttttattggtcttcatggtggtggcttaattgttgccaacaaatcaacggttgttggtctgggatcattgacagttggaacgacctggttaactatttttggattgatcgtcacgttgattttgatgagtcgcaaagttcccggtgggatttttatcgggatggttttaacctccattttagggctagcaactggcttgattaagatgccatccacaattgtttcggcagcaccttcgttgaaaccaacgtttggtgtggcgcttggtcatattggtgatattaattcgttacaattgattattgttgttttgacgttcttattagtgacattcttcgatacggccggaacgctagttggattggcagaacaggctggattcatgaaaaataataaaatgccgcgggttggtaaagcgttgatggccgattcaacttcgatgttagttgggtcagtgttgggaacctcaccaacttcagcttatgttgaatcttcggccggaattgcggtcggtggtcgctctgggatgagtgcagttgttactggtgcgctattcattcttggattatttttctcaccgttattaaacgtcgtgacggatcaagttactgcacctgcattgattattgtgggtgtgttgatggcagaatctttaaaacagatcagttgggaacggtttgaaattgccgtacccgcatttctaactgttatcgggatgccgttgacttatagtatttctgatgggattgctttaggcttcattgcatacgtcattacgatggtcgcaactaagcatgccaaggaagttcatccattaatgtacgtgctgttcttcatcttcattatcttcttgtggatattaaatgtctgacagttaaaggtggtcagctcgacgttattggctagttacagataatttaaatgacttaattctaaacgaactactgacgcacatgacgttggtagtcttttttgacgtgaaataggctaaaacttgatgagcgtcaagttggtttgctttggaggtgactatactagagtcattcaagtgatagaagggggaggtgaagcaatcagaaagttaggataaacattgaaatgtaagcgccgtcatcaaaagctatcttgaaactagctcatgagcagtcaatcggccgagatttgctaagcggggcaagcgtaacgagtggggatgtacccgtaccaattcgatttaataagacaaatacacaattagtacggtggttaaggtggtataccggtgtcgaaaataatacaaaatataaaaatacaaaaaaatacgttttttttaaaaaaattaaaaacgctccaaagcctgtcgttaacgcttgtaaaccatagaaagtttcgcgaaattttcaatgatagataaaatctattaataaaagcgtttacattttgaaaattcgtgattacaataaagtcgtaaagttgataattaaaatatatcagaggaggacattactaatggctaaaattagtggttcagatgccgtattaaaagtaattcagaagtggggcgtaaaacatatttatggtttgcccggtgggtcgttcgattcaacgatgaacgccatctataatcaacgggaaacgttgaagtacatccaagtacgtcacgaagaagctggtgcgattgccgcttccgctgattataagctaactggaaagatcggcgtctgctttggttccgctggccctggtgctgtccacttactgaacggattgtacgatgctaaggaagatggtattccaatgttagcaatcgttgcacaagttcctactaagcggatgaacatggacttcttccaagcaatgaatgaagaaccgatttttgacgatgtggctgtttggaatcggactgcgatgactgctgagagtttaccgatgatgactgatgaagccattcgtcaagcgtatgcccacaatggtgtagctgtcttaacgatccctaaggactttggttgggctgaaattgaagacaactttgaaacgaacgctagcgtgcacactgttaactatcctgcaccaaccgctgaatcagttgctgatgcggttaaattaatcaaagctgctaagtcaccaatgatttactttggcgttggcgctaaggacgcggctgaagaattaaaagctgcttctgaaaagtttaagatgccacttgtctcttcagtattagcgaaggggatcattgaagacgactatcccgcttacttaggttccacgggacgggtcgcacctaagccgggtgccgagattggatttagtacggatctaattctctgggttggtaacaatgttccattcagtatcttcttatttaataagaaggctaaggtcattcaaatcgatattgatagtgaaaaatttggtaagcgccaccatacgaacgttgctattcaggcggatgcgaaaaaagctttagcggcgatcaatgcagctggtgaagcgcgcgatgattcagccttttatgacgctgcggttgctgataaaaagaactgggacaaatggcaagccagcttcaacgatagcactgaatcaccagttcgccccgaaccaatctttgatgtcttgaaccaagaagctagtgacaaagctgtttgggctatcgatgtcggcaatgttaatattaactttgaacgcttgatccgaatgcacgatgaccagaaatgggcaacttctgggatttatgcaacaatgggctttggggttcctgctgcactggctgctaaagtcaactacccagatcgggacgtctacagtttgagcggtgacggcgctttcgcaatgctgtcagaagaaatcttggcacaagttaagtataacttgcacattatcaacattgtcttcagtaatgagaccttaggctttattgaagctgaacagactgatgatagccatcaaccactctctggtgtcgatttgccagatactgattgggccaaggttggcgaaggctatggtgccgttggttataccgttcggaccaaggctgaattcaagcaagcccttgaagacgctaagaagacggataagccagttgtcattgatgtgaagttaacgcatgcaatgccatttacaacggaacatatgtatctcgatgacgcatggcaagataaagacaagattgctgaatttgtcaagaagtatgatgctcaagcgttgaagccgttcagctacttcttaaaacaagctcaaacaaactaatttggatagataattaacgaaagaggacgcgattatcgcggctcttttggtacatagtattaagtgtcgcttgccattgtggcggtgacaacataccaagctgtagagaacactacgtgaacgttcgggaggtcgcacagatgcaagtaatcaatttagatgcccatcgattaaagatgctggcaccacaaccgccactggtattagctttaggtttctttgatggtgtgcatcagggccaccaacgcgtgattcaaacagcgaaacgaattgcgaagcagcgtgatttaccactcgctgtgatgacgttcaatcgacacgcgtcacaactgtttaagtcccagaccacttttcggtatctgaataccgtcgcgcaaaaaagccaacatatggcggcgctacaggtggaccgactatatattacggattttaaccaccaatttgctggcttgacaccgactgcgtttattaaggattaccttgtcgggttgaatgcgcaagtcgttgtggcggggtttgactatacgttcgggcagggtggcacaaatgggatgcgcgaactcgcggaattgggcgccccgtactttgaaacggtcacggtggatcgcttggctaatcagcagcttaaagtcagttctactcggatccgggggctgattgctcgggggcagattgaacaagctaatgatttattggggtacacttacgcgacacaggcgacattcgatccgttgactagaacgatccaacttgcaaatcggcaacagcagttaccagcggccggtgattatcgttgttggttagttagcgctaattatcgacaggcagtcattctgcgagtcaccacgacattaaaaattatttcgccataccagttgccaccggaaacctcggtattagatgtggacgttcagtggcagcagcgtgctttgcaagtggtcagttctgtctcagcccagcatcaacaatcacaatatagtaaagcttaatgtagaccaccctgatttgtttgatggggtggtttttgattgtcgtcacgtcggtaagttgttcgtgctagattgttagcgatatttgataaaactgagtatcgggtgtgtgcttgatcctatttttctagtccatagatagtttcacatgaaataatcggataaacacaaaattggcgctgaatggtgccccgttttgtgtacttgtaatttcacttacgaaaagtaagcatattaattgcatttataattgaaagcgatttataatacgtttgttaaatgaattgaaccaagcagacaaattggttctaagtcgaagggatgaatagtgatgacaaagatgattgcaggacaagctttagttaaggttttagaggcgtggggtgtggaccacatctacgggattcccggcggttcaatcaatcataccgttgaaggtttgtaccttgaaaaggccgatattgattatattcaagtacggcatgaagaagtgggggccttagcagcctcggcagatgccaagtttacgggcaaaatcggcgtttcatttggttctgcgggtcctggtgcaacgcacttattcaacggtttgtatgatgccaagatggatcacgttcctgtattagcacttgtcggacaggtaccacaagcgacgatgaacacgaattacttccaagaaatggatgagaccccaatgtttagtgacgtggcggtatataaccgcactgtcacgacggccggacaattaccatatgtcattaaccaagcgattcgtgaagcataccggcaaaagggaccggcagtcgttatcattcctgaaaatctctcagcggaagaaatcgattatcagccggtatcgacgcctaacaccgtttcagatacgtttgaacaacgggtcgatcctcaggccattacggcaacgttaaagatgctaaaagcagctaagcatccattagtttacgctggtcggggtcttcttggtgctaaggcagacctggtcaagtttagtgaacaattcaatattccagtcatgaatacggtcccggcgacgggggttattccaacgaaccacccgaatgcaattggcacgtttggccggttgggttccaaatcggggttcgaagcactccaacacgctgatttgattttgttcctgggatctgaatttccatttgctagtttttggcctaaggggattaagattattcaggtcaacaataacagttttgatatcggcaagatggtcccaatcgattacgccgtcatcagtgacgcccaagcttatttgcaagcgatgattgcaactggcgaaacgttacctgaaacagcgtggttaacgactaaccggcaaaataaacgtaattgggataagtggctccaacaattggctgctgacgaccatgatggactagcgccggaagcggtcatgcacaaagttgctagtatggtcggccctcgtgatacctacggagtcgacaccggtaacgtctccgaatgggctgtccgggggctcccaatggatcaggagcaacgctttgccttatctggcctcttcgcaaccatgggatttggactacctgctgggatggctggtgccttaagtgttccagacagccaagcgtggagtttctcaggcgatggtggctttgcgatggtagcgccagatattatcacggaagcacgttacggcttgcccgttattaacgtgattttcagtaatcaacggtttggtttcatctatcgtgagcaagttgatacgaagcaacacttgtatggtgttgatctaacggatgccgactgggccaaagttgcagatggccttggtgggattggttttactgttcaaaataatcaagaggtcgaaaccgtctttgaccaaatcaaggcgctccaagcgaagggcaacaagcggccaatcgttgtgaacgcggtcatcaagaatgatgatccaattggcacagcttacatgccactagatcctgaattatatggtcaagcagaagttgacgcttatgccaaagccaaccacattgatattaaggaacagccatcattaggcgccttactacgagcacagggtgatcagctatagttaaagcctgaagggctagttagaccactgggcaaagcttcagttaacctaatattattaagaagccgccagtatcgggtatgacctgatactggcggcttcttaattgttcagttaggatttatttttgattaaagctgccatcttccacgtcacgaatgaattgtttcaaatggtcaaagtagacgggggcattgtcgatcatgtggtgatgaccaccatttggcgtcgttactaagcgtgagttaggaatatcacgagccatgcggcgggccgaagctaatggcattgtttcgtgttcaccgaaagttaacagggtcggcactttaatgttgtgaatctgatcgcgaatatcccattcctttaacttcccagtgataacgaattcattatcaccttgaaaggcgttgtatacaggagtggcagtggtgttgatcaaatggcgaattgaagtgggttgtttgcggtcaacatagccagcgttcagaacgtccacgtacttctgatattggggatcattccagttgccttccgcttccttttgcttcatgtaagcaacagcgtcagccggtagggcttcttcacgacacttgttaacgttgacaacgtattcctcaatgttatctaccatacttgaaataatggcgccttttaagtgttgaccatacttgagcgcgtacatcattgtgagggcaccgccccaagactgaccaatcaagtagaagttatcgagtcctagtttttgtcggacttcttcaacttcatctaagaagtagtcgtaggtgagatatttcttagcaatttcaggatctgagtagtcgggttgatccgaataccaggatcctaattggtcgtacattgaaacttggacgcctaaatctgccagttcctcaccaaagttttcccagtattcgtgattgccaccagggccaccgtgtagacataataattgaatgtcgcctttgccctgagtattcgtccataaatggtagccattatccagcgtgatgattgtcgttccttgtttcaaatgatcacctaatttcttcatattttaattgttatcttaccactgttaactaagcagggtcaaagagactaggcaatcataaagaattgcattaagtagataattggtaaggtcgtgttcgctaattaactgaatcagtacggtcgcgtcatagtagctgagcatgggaggggaattcggtcgaaacgatataaaaataataattagaacgggccgtttagtctgaatttggtttatactagttattatgctggtcggtacgactgatagaccaagtttcagtcgtattgtgaccgattgtacacaattgatttgacaagcggttacattttcagcgataataagtaaactgctcagcacagaaagatgtaatattacattctttaaattcaattgcggttagttaaccaatatgaaataatgggttaactaattagagatgggtgagattgatatggcaaatcaagtcgcagttttacgcttgttaatccaagcggcgcccgcgtactgttcgggtgactggttggcacaacgacttgcaatcagtcgaacggctatttggaaattagtgcaaggattgcaagcggcgggccatactattgagagccggcatgggcgaggttatcggtatgtggccaataatcaattgagtgcgccggtgattgaatacgcgcttacagcgttaccaccgtttgatttgaccgtgctaccaacggttgattcaacgaatgcctatttacggcggttagtcacgcagacgcctttagcacttccgaaaatcgtggttgcggatacgcaaactgctggttacggtcggtcggggcgggcattttattcgccagcacagactggaatttacatgagcattgggttaccactcagtgaccagaaggcgttagacgctggtttgttgacaacgagtactgcggtagtcgttgctcagacgctgcaacagctgtttgcggttgacgtttcattaaagtgggtcaatgatgtgttagtcaatcatcacaaggtggttggtatcttatcagaaggcatcactagtctcgaaacggggcaaatttcagcagtcattattggaattggcattaacttaacaacgacagcttttccagcgctactagcgcacaaagcgggcgcagtcgttgccaatccaaatggtgtgacgcgcaatcaagtgatttgtgagctactgcggcgctttttcaatagctatgggacttatcgtagtgggactttcatggacgcttatcggaaactctccatggtgatcgatcaacaggtcgagttgaagagcggaacgcaaaagtatcgtggagttgtcacggatattgatgcacacggggcgttagtcgtcaaattagagactggtcagagtcgtcattttagttctggtgagattactaaggtgaacctcttgtccggtggttatcatggctagcaagtttgtaaaatcaatttatcaagttaccgaacgaatcgcgtcaatcttttaaaatgatttctgattcaatgttttactggttcatactgttgtatagtagaagttagtcacaagtagtgctaatcaatttcaatttgattaattgagctgtttggtacgtcgaatcaaccttaaattgttgataacataggaatgataacggatggattaatagactcacgtttgatttatttatattgtaattaagttcggggttatatgtgtttaatcagcataatgaataaagtggttaataaaaataattaatgaagtttaaataatgctggtcaatgcggtcatttacatattatagtaaaggtaccgaagcactggtgggttagttaatatttgtagagacaattcaaggggtaataggaatatgaatgaaaatttgcggagcgtaaatatgagccgaacaatgagtcggatgaatcgacaccggatgaatccaagacgttatatcaccggatttgatggtatccggacattggcggtgctgggtgtcatcatctatcacttgatgccggcctcactacaaggaggttacttgggagttccgatcttcttcgtcgtttcaggttatttgattacggatattttattacaagatattttgagtcgggggcatgtccggatatggcggtttctcggacaccggatgcggcggctatatccagcattcgtgacgatgttgttagggacaacagcctacattacgctgtttcaacggtcattattgacgaacattcgggctactgtattaacgaatttagtctacgtctataattggtttgaaatcaatcacggtcaaagttattttgaccgtttcaatggtgaatcaccgttcactcatttatggtcgctctcaattgaaggacaatattacttattctggccattagtgattggtatcttgatggtcatcttcaagaagcgttcacgggtcttctggtttatgatgattgctgcgggtatttcagcgataaccatggcaatgttgtatgatccagcgaatacgaatcgggtgtactacggaactgatacgcggatgtttgcaatcttgttaggttctggccttgcgtttatctggccatcacgggaattatcggcggacattgctaatgttaatcgagtgacactggatatcttaggcggtgcttcgctaattgcaattatttggatgtttttccagatgtccggtcaatctgatttcacttatcgtggcggtatgttactattcacagtcctatcaacagtgttagttgcaacggtggcccacccggctagtcatctcaatcgcgtcttgacgaatccggtgtttaagtacgttgggcaacgtagttatgggatctatctctaccagttcccagtgatgattttctacgaaactaaagttaaaaacattggtgatcatttactcctcaatagtttgattgaagttgccttaattttgatcgtgacggaattgagttatcggtttattgaaaatccaatgcggcactatgattacagtcggttattggtcgacttcaaagatttcctccgcaaaccgaagtttaaccgcgtgaccactgcgattgtcgctttgaccacggtcttattcgttattacggcggttggtttcgttcaacagccaagtaaagcggaagctaacaagaagactgaattacaaaagacgattgcagctaactctaaagcggctgataagaagaatgcggcggcgctcaaacggcaaaaagctgcccaggcagcggctgcttcaagcaagaaggttgcgactgaaaagatgcagaccaagcaggctgaagcgaagttgaactcgaagcagaagcaggtggaaaaggaatacgatttgaagccacaagttgttctagcgatggccaatacggatctgacagccattggggattcggtgttactggatgtttcttccgatcttcaagatgttatcccgggtacggtggttcaaggtcgcgttggtcgtcaagtgacggaagttcctggaatcattaattcgctgaagtcgcaagggcaattagcccataacgtcctattgaacattgggactaacgggacaattacggatgatcaagctgaacaagtcgttaaactgattggtaaggatcgtcagattttctgggtaacggcccacgtcccaacacagagttggcaaaatcaggtcaatgctcaaattgccaagactgctaagaagcatgcgaacgtgcatgttatcgattggcatggtcgtgcgcagaatcaaagtggttggtttgcagatgacaatgttcatccaaatacgactggtaatcgccagttaacgaatttgattgcgaaccgcattgccgaagttaataacaattaaagatgagttccagcttacgttgatggtaagctggaactttttttggctagttccggacaggtggtggtgtccgacctggtcatgataagtggctgtttaagttgaaggtacacaaaaggcccaccagttaacggttgtgtggttagttggtaggccataattagttagtctgttatttttttcattgggacgtgtaagcgaatatcgttcaagttaagtgagtactgtaggtcttgattgccacgaatcgtcatcttcatatcagttgcgtaaatgactagtccgagttgatgccccttcagcaagtggtggaacagcggttggagatccacagaaaagtcataaaagacatttggctgaatcgcttctgcgtgccatgggtggtggcggttctgtaagttaagatgccccttagtaatcatcttgaacggcgtctcacccgctaacttgaagtccttcaaatcatcttcgcgccagtggtaacctagatcaagcgcttttgcagccagcatttgtgggctgacagtcaaacggcgcgcggccccgaagtcaatcagcataaagctcaacatgccgaaattcttattaacggcgacagagcccgcaacgtgcggaatacccactaataattgatcctcaggtgcctgccaagacttgaacaagaggcggtaatcatagagcggatttaacttatcctcttgcaagaggtcgcgctgccaactatccaaatgatgcttatagtggtcgaataatttgtcaggcaatttatcagtaaaatgagcggcgcgttggtcaactgtatggtcagcaggaactaattctttgtactgaaccttaaaatctaaagcgtcggttgtgtcttgccaccaattgtcatagccgtgccaagtttgggcttgcgtgttgtcttgtaccaagacgttaggcaagagtgtctccgcatgattatctaaaccatataatttatggcttagccacaagttcatcatgtcggtgaaatcgagcgattgtaagttattgatataaatatgttgtccctggtgcaaaatgagctttttagtaacgggaactgcctgtaatttatcccataaattagctacgttgcggggcttaacgttccagtcgttgagcccgtgaaccatgatgatgtccgccttaattttgtcaacgttcttgagataattgcgttcatcccagaaacggttatagttaccgcttgctcggtcttggtcggcagtcagttctgccagtttctgatcaaacgcgggttggatctggtgagcgtcaccggcttttaagcttcgtgagaagacctcagcggcgagaacatcggtgtcttcgccctggaacgtatcgggagcgacaaccaggccattatctcgataatagtcgtaccagcttgagatggcggcctcggaaataatcgtcttaaggccagccacgcccgtcgtagcagcggcagttgcgagggtaccgaggtaagaccggccagtcatagcaacggcgccgttgcaccaccaagctttgatagcgatattgccatcacgattggtgaaggcttggcgtttgccagtcaaccattcaataattgcaactgttgaggtcgtttcatcaacgtcaccggtaggggctagcccatccgagtcgatcgaaccgattccagctgcatagacgacagcaaaaccgcgcgctagaaagtaatcattgagcgtgtaggacttttctcggctgaaagtctcctctgctgtatcggtcgtcgtggtcgcggttcgagcggctggtagttgcgccgttgttggctggaactcaacatccgcataggtattttcgtccggttcctttgcagtcaggggaacgtctacgttgtgcatttgagcatcgccagcttggtcgttgatgccctgattataaggactagcggtatagagaacgggaacttttaagccggtttcggtctcagctggccgaaggatttcaactttgagcaggtcccgttggccgtcgtggtcagtatctaaaggcgcttcaacgtagacgacgtcacgaatgagcgcgttggtatcaaagacggcttgggccttaccattgaagaagagtggcttttgatcgttaggtaattggtaaaatggtacaaagtaaccccgggtcgtgagtgattcaatcaaggtttgtccattattcccacgtgtatttaataataggtaccaagcataatagagggcttcacgatcaaaggcgctatcaccgaccattggcaagtgaatatcgcgcatcgccagcaatggatcggccaattcaaaatcttgaccaggtagaaaacccagtagctgaagtcccacgttataaaagacttgattgtttacgatagttgcatcggcgagccattctgataaagtgtgctggctggttgccatgatgttattaaacttgtgggtcaagccgcttgccgtgtgaacttctggtaagcttttagccagcaatgcctggtagacggctggaacagtcgtcagggcgtccatatcaggcgtaataaaatgaatttttgtaagttcggcaatcgcggtttccgaatcagtcgggacgattgcaaattgattatttttcataagtaaattccccattaagtattattagaaatattataccgctaattagtcgagaaccaatgcttcttactgacaagtttataatgttgtggcaggttaattgcaaagtgaactatcgaatggaggaactaagattgagtgattttccaattttatatacgacccaagcagttaatgaagacggcatcgaaggacacgcctatattcccaatggtcttgaggtggccgtatctagtccacttaaggcggtgccgggctcgaatccggaacaattaatcggattggcgctcagtacatgccttaacgcgacgctggaggcaatcgaaaaggagcacagccagacacatcagagcaaagtcgtgactacggtgaagatgtcgcgtgaccgttttgggtaccaatttttcctagatgctcgggtcacgattccggaagtggatgctgaaacggcagcacggtggctcgcgattgcggaaacgcgttgtcccgttgccaagctcgttgggccatcagccaacgtgacgattcaattggcttaaccgttgtgatatggccgcagtaatcattaatcgtagtttgtaaaaatgtcaggggattgattaaaacgtggttcgagttggcagcgattaaaactgccaattcgaaccacgttggtgttaatgatgactgcgaatttgcttgaaaagttggcgtaaacttgggtgctgactagtaactgctgactgaactttatcgacctgttgtagggcaagttgcttcgttttttcgcgttcgattttgagctgcttgcttagtgctcgcgatttccaaaagccgttgatgccgacgacaactggaataatgtgtaataaggttgtggcgggaatgagccagggatgcttactgaatagttgaacgacctgggtatgatgctcatgaaggtcgtcatggatcgttttaggtgttaacatgattaaaccacgctccttaattaagtatcattatcataccttaaaatgtaatcgttgtcatcgttagctggctgacaatagttaaagcgcccatctcaagttgattgatcacttgagatgggcgcttttagttagtacaaatctagattgttactcatcagctttattcatgcgactatgccgaatgccatagccaaagtaaatgatgagaccaaggaggaaccagactagggatgccagccaagtttccatggatagctgggtcatcatgaacaggcacagcaagccagaaataattgggagaaccgggtaaagtggcacgcggaagcccttgatcgcgttgagcttgggattacgccgtagtagcaaaattccaaaagaaacgaaggcgaaggcaattaatgtcccgatattaaccaagtttgccaattggtctaacggaatgagaccagcaagaattgaaatcacgattgtaaccgtcaacatggcgtttttaggggcgtggtgcttatcgattttacctaagaaacgtgggagtaagccgtcacggccgattgaatataatagccgtgagctactgtagatcatcgtaaccatcattgtgaacatgccggcgagggcaccaatcgagataataccggcaacgaagttttgatggacgagttgtaaagcgaacgccactgcatcgtcaacgttcaactgtttgtacgaaaccatcccggtcagcactcctgaaacgagaatgtagaagatggtacagatgactagggtcccaatgattccaattggcatgttgcgcttggcatttttaacttcggctgccgacgaagacacagcatcaaaccctaagtaagcgaagaagacgaccgcggcgcccttgagaattcccgtcccaccaaatggggcaaagggtgtccagttacttggtttaacataaaatgaaccgactaataagaacaatacaatgattgctaattttacgaccacaataatattgtttaatcgaatcgacgtttttaggccggtatcgataatccaagcaatcagacagacaatcagaattgcgatcacgttgatataggtcccgtgggcggggtcaaacgaaccggtgatggctttcggtaacttgaggccaaaaccagcaatgaatgaattaaagtacgcggcccacccaacggcaacggtcgcaacggctaggacgtattcgagtaccagagcccaaccaatgatccaaccaatcatttcgccatagacaatgtttccgtatgaatacgcggaaccggcgattgggagcaccgaagcaaactcggcgtaacacattgcggcgacggcacacacaatggcagccaaaacgaaagataaaataatcccgggtcccgcttttgttgcggcaaccgttccgggtaggatgaaaatcccggtcccaatgacggcaccaatcccaagtgcaatcagatcgactgcggagagggttcgttcaaaatgactatctttttgtaaatagcgctccaaatcttctttttggaaaatgcgctggaaaatccccataacatggaccacctttttggttatttgtaacagttagttgtcattatcgacaaatcgtcatgtcaatatgataccgtggttgattattaaaagtcaattagaatcagccttttattattaataactcaatgggatacggagcaagatagctggttaatcatcatagaagctggtgacattgcgactgtcgaggcaatgttcgtgctgacaatagatttgatgacgataacgcgtaaccagtcatggtggggatttaaaaagcgttgtgatggccgaattactagtcatcacttaagccggcggtaacggtgctaagctgaagagaaacgggtctgaatatgcggttgggtagctgttactattgttatttataagttgatactttgttataacgaacggtagtcaaagaatacacacggataatacattaaactgttaattggattcgccaaagcttataatattgttatcaatagaaatttaattttagaatggtgggattaggatgggagcggcgattgatattaccggtcagcacttcggacgcttaatagctgttcaccgagcgggccgggccaagaatggtaatgcgctctggttttgtcagtgtcagtgtggccggacgtgcgtggtggattcctacgttttgcggcacggcaagacgcgtagttgtggctgtctagccgtggaacagagtcggcaaaatatttttaataatccgcaagcagtttcgcatatgggggacccgcgcaatttgaagattcgtgatcaccatacagatgtgagttcaatcaagaagtcgaagcgtaacacgagtggggtcgtgggcgtgagctatgacaaacagtcaggttcctgggttgcgcacttctactacaaaggaacgtacatattaaacaaacattttgcgcattttgaagatgcggttcgggcccggcacgctatggaacagcaatatttaacgtcatctgataactgaaactgtcggatgcccacgttaggattcactagcaaattgtaggctagctaatattgtggataatatttgaaggaactgaagtcggttaagtgtcgaagggcttcgacgtaatgtgtgcttagtctgatgaggatggatgataaattttaatgagttgaacaacgggactggcaatccgctgctcaactttttgagtcggcactaatcaagcttaatgatgacaataccgttgcggtttgcagtgaggagtaatcaatgcttatttgagtggttgatttaacctttcttttgaagcgaagaggttacagtcagtcggagttctgatagaataagcattacacgagataagagggggtagcaagattgtcaacaatgttagtggcggaagatttatccgcagtcggtggaatctcacttagttcagcgttgcccgtattaacggcgatgcagtatgacgtggcagcactgccgaccagcttattatcgacacatactagcgggtacgggacaccagccgttgtcgacttatcgacgtggctgccgcaggtctttgcgcattggacccgtgcacaactgcattttgatcaagccctgatcggttacgttggttcggtcgcactgtgccaacaaataactacttacttagaacaacaaacgctgtcgctattagttgttgacccagtactcggcgatctcggtcaactctatcagggctttgatcaggactatgtcgcggcaatgcgtcagcttattcaacaggcggatgtgattttgccaaacacgacggaggccgcattgctaacgggagcgccctatcaagtgacgccagatttagaagttattttgccagcactgcaagcacagttgaaaactggcgcccacgcagtcattacggatgtccaacgtgctgatcagattggctgtgcctggttggatgaagctgggcacgtgcaatactgtggtgcgcgacgtttgccggggcattataatggtaccggtgatactttagctgctgtaatcgcgggactgttgggccggggttacgcgttagcaccaacgctggcgcgcgctaatcagtggttgaatatggcggtagcagaaacgattgcacaaaatcgaacggatgaccggcaaggggttgcactgggggacttgctccaggcaattttagccctcaattgatgatggaacatgttatactagagcataattcataattaggaaggtgcgacttcatgagtacagaagtagctagtggtgcggtcgtctatcaacaaaaagatggtcatcccgcttatttattattacagagtgcgaccagtgatttttggggctttccgaaggggcacgttgaaggcaatgaaacgttagctgaggcggcgcgacgtgaaatccgtgaggaaactcaaattgaagcgacactcgataccaattttaaggcgtataccgaatatgacttaccgaatggtaatttgaagcaagtcacactgtttgtcagtgaagttccaagtggtgttgtagtgacgcggcagcaagctgaaatcagtgcaattggctggtttgattatgctgctgcccgcgaacgattgacttacgataatttaaagcaaatgttagatcaggctaacacctacattgagcagcatctacaataatactgactgtaaaaaaattactggtgccgtcgcataaacggtaccagtaatttttaaacaatatttttagattggcttaggcctgggtttgtaagtttgcaactgcatcttcgattgttacgccttcagcgaacaattctggatgaagtttgtcagttgcgacaaacatttggcgttgcgtatctaagacaatgctgaaccagctatttgttttttgaaattgcatatgacaaaactcccttctgaaaattgttggtttgctacgagatgcgtgaatcatctatttgaaccttataggtacgttactatactcggtttaccgagctaacgcaaatgaaaagctttacatggattaaaaaatggaggtttatcaactttgacaacgaaacggatctttgtgatcacgggaccaacggggagtggtaagaccactgtcagtcattacttgcggtcacaataccaaattcctcaggtgattactcatacgacccgggctccccgggaaggtgaagtcagtgggcgcgactattattttgaaactccggcgagttttgtcacgaaacattatttagaacacgtgacctatagtggtaatcaatacggttcttcacgagaaggactagcggcagcctgggaacggtcaccactgattagtatcgtcttagatacggcgggggctattacctatgcgcgggagttgggcgaacaagcggtggtgatttatctcgaggttgctgatcaagaggcgctaattcagcgtttgaccaagcgaggagatcttcctagccggataaaaaagcgagttgctagtgatgagtatttgcgggaccaggctttgccagtaggattagtggggcatgcacatgttatcgtgaatgatgattggcaggcgacgcggcgccaactagatgagctggtcactgaatattgtcagcatgatgttgtgacgaaagattagcgctgacgtatagacggtcaacgtaattcacttttacacttgagtatgctaaactaaatagtaatgattatgatttagtgaagtcctggtcagtaggaggcagcaacattatggaaacaccaattgaacaagccgtcgcaattttacgtcgcaatcagtttaaaattacgaagcaacggcaggcattattagattatctggtgacctatcaggaccactatgtggcaatttcggccgttgatgagcacatgcggaccttatttgcaggaatgagtcacaataccatttatcgcaatattaaagagtttgaaacgttaggattattggaattgaaggcccaggctaatcaaaccctggttaaatatcaatgtgatttcaaacatcaacaccatcaccattttgtttgttcaaactgtggtaaggtgacggaactgcaagcgtgtccgttagacgagtatgaagcacaattaccgggttgtacgattacgggtcaccgcatcgagatttacggtctatgtgccaattgcacgaaaaagcaggcaattaatagctgacggggagtcggcttttttgttggccttgtttgagtaaagagtttcttaatttgtgatagaattagtgcattccgaacacgagcatggtttaattatagattagaaagaataacggcaaagcctcagaagggaatgacatcgatggcttatcgaacaccaccatttatttcaccatttgcaattgtttcaattgtccttgcactgggggcaactaacgtggtcgttaataagacaacccatactgtcaatggcgccaaggccactagcagtgtggtcaaaagttcatcagctagttccgcaagtctgaaaaagaaagcggctgatgatagtagcgatgagaataaatccaaagacaaatccagttcagatacgtctaatgatgaacagaatagtagttccagtagtagtactgacgagaatgatacggacagcagcagtgctaataagaccagtagttcatcaagttcagctgatgatacgagttctagtgccactaatagtagtacgactgataacaatagttcaacgactgatacgagtgacgatgatgaaagctctgctgctgagtcatcaagtacgaccgcgtcaagctcgacaacgacaacgtcacagtcgacaacggataccactactagcgacgggggcgaataacgaatgtttagtattttagatatgatcaaccacgccttgggttacgttaatgtcaatgtgaagattaagaaccaaatctatatcggcattggaattgcgggtaatttatacctcggttatgtggcaattcgcttgatgcagaatggcgcgtggttacggggcatcttatatatgctcgttttcttggcgctgatttatttcattacgttaaacgtcatttattattttactaataaaactgcgaagtatgacttatcaccacgtattgaaaaattgttgggtggtaagcctaaagaagcgttagcagctgaaaaacaagcacaacaaagtcagcaacaaccatacattcctgcgaacggtatttttgatgggcaggaattgttgcccgccacggtgaagacttcacgtgctgaacaggagaatgtgcatcaaatcgttgatcaactacaagcggcgaacattgttcgattagattacggtggcttaactgatgatgccatcattcagcaggcgcaggcaacgggtgaacccgtttatgcgattgggcaaggcattcaaattcctttttcgcagttaaagttggagaatcaccggctagttatttacgctggaatcaatcagatggaccaatccccggttgggcatattactaaggtcggcttgaccgatgttcatgatgcgcatgaggattataagttgtacttggcctccacggtaatcacaggtggtatgagcaagattgcgggccgaacgtcggctatcgagcaaccgggcgattaccaggtaaccgcgcaggttgcgtatgagggaagagaagattaagagtgctcacaaactgcctttggaagcacgtttcgactataaagcgtgaacagggctgataatcctgggcttggattatcagcctaacagggttaagcggaactgactgtgtcttttagcacgtttcggcaagcgggagttaagcggagcaaactgcctttggaagcacgtttcggtagccaaattgaatctaaacacaaaacaaccgttttgagcagtggctcgaaacggttgttttgtcggtatggctatttaaaaagcgctaaaatgtctaatggtttttggaagcggtgggccactttttgatggtcggcgttagggtccattccccagactgccagtccaaaatcaacgttagcggcctgggcagtttgttcgtcactgacggaatccccgatgaagagtgcgttttgtggcgcaacgttgactttttcgagggctgtgagtagggggaggggatctggtttgcgcttaggcgtatcgtccgcactgattgtgacagccatccgcatcatgaatggatacgagcgcatcccactttctaattcgtttcgtcgttgggaagtcacgattccaagtcttagttcagacggcaactgttcaaagaggctggtaatgcctggataaagttcaatctgatcataatggctggccatgacatcttcgtattgggcctgaaagtggtcaaactcactggctgcaatccccaattcagtcattgcttgttcagcggccatgggaaaagtcttctgcgcttgggcaggactaaatggtttgccataagtagcaagtacctcacgcataaccgtcgtgtaagctggttggctattagtcagcgtgccgtcaatatcaaacattaatgcttggtaagtcatataatcgttccttccaaagtagatttaactccagtatagcaaattcgtccttgacagtggttaggacaaccattatagttagattaacaattgatgaggagctaatgatatgtcattaccgttaaattcattaaaatctagaactagcttttacttttggtattttcgctagtgtttgtgccggctgcagaggtgcaaacacgaatccgatgtttgcatcgatgcggttgccaagagtattttgtgatttgacggcgcccatggatgtttgaaaattccaagggtggctaataagtttgtttctgcgtggtggcgcaccctttggaatttcaaggggtgcgcttttttgaccctagtccagtccgcttccaccaacaagatcagccaaacttgggaggaatctttatgtcaattaattcagaaacacttgttaaccatatgaatcatgaaattgcggcgattcagccgtctgatattttggcgttcaacgctgaaatcgcaaatattccgggtatcgtgcgtttgaccctcggtgaaccggattttaatacacctgagcacgtgaaacaagctgcaatcgaaagcattgaagcggatgaaagccactatgcaccctcgaacggaacgttggccttgcggacggctgccgctgaattcttggccgctaagtatgatgtccattatgatcctgctagcgaagtgattatcacagctggtgcgaccgggggcatttatacagcgttgacttcaatccttaatcctggggatgaggtcctgattccaaccccaatttttccattgtacatcgcaatcgttaaattatctggggcaacaccagtcttcatggatacctcggacaatggcttcgtgttatcgcctgaccagttacaaacgacgttagcagcccaccccaagacgaaagcggtggtccttaactttccttcaaatccaaccggtgtgacttaccggcatgatgatctgaaagccctggccgcagtgttagctgatcaaccaatttttgttttgtctgatgaaatttatagcgaattgacgtatggtgagcctcatgaatcgattgcaaattacttaccaacacaaactattttgcttaacggcgtctcaaagtcgcacgcgatgacgggctggcgaatcggcatcatgtgtgcgccgaaagctatcacagcacaactgggtaagattcaccaattcacagtgacttcaacgacgaccaatgctcaagcagctgcgacggaagcattgaaaaatgggttagatgatgcccaagtaatgaaacgtgagtaccaagaacggcgcgattatttgtatgatgcacttaatgaccttgggttccaatcagctaagccagaaggggccttctatctcttcagtaagattccagccgggttgccacaaaatagtatggctttttgccgtgaactagcccatgaagcacgtgtcgctctgattccaggtagctcattcggcccgggtggtgaaggctatgttcgaattagttatgccgcttcaatggccgatcttaagacggcggtcacgcggctcaggacgtacgttgccagcaagaagcagggggcttaaagatgaaaattttaatgtatagtgttcgcgatgatgaacaggatgcgattcaagcgtgggctgcggctcatcaaattcaagtagatacgaatgatctggaattccatccagaaactgccgacctggtcaagggttatgacggcttggtcattcagcaacgcagtccaattggtggtgatgctagcttataccaatcattagctgcggccgggttaaaacaactaacgagtcgtacggctggtgtggatacaatcgatattccggcagccaaggcggctggtcttgtggtcacgaacgtcccagcctattcgcctaattcagttgctgagatgtcggtggcacaaaccatgcgcttgattcgcaacttggaaatgtttgatcaacgaatcagccaacagaattttcagtgggcgggactgcaagcacgagaaattcgatcattaaccgttggtattattggtgcgggtcgtattggtggcacggccgctcgacttttccacgggttaggtgccaaggtgattgcctatgacgtggtacgccatcctgaactcgaagacgttttaacctacgttgacactaaggaagacctattgcggcaggcggatgtcgttgatttacacgtggatttgaatgagacctctgcggggttgatcgatgcggcagccttgaagttaatgaagacggatgcctaccttatcaacgcctcacgcggaccagtgattgtcaccgatgatcttgtggcagcgctaaaggccggtgaaatcgccggttgtgcactcgatacggttgagggtgaaaatgcgttatttaaccaaaatcatcagggtgaggtgcttcaagataccaacgtggcacaattaatgcagatgcccaacgtcattatcacgccacacgtgggtttctatacgaatttagcggtcaaaaacatggtcgatattagcctggatgacgtcttagcaattctaaatggtgaaacgacggcccacgccttttaatgatggcgtcagccgctactaccagtatggctgtaggagacggtggctggtcaaagtgccccaccggttaacttgttcggcgactcgctgttcgataactagcttatagcgggactaatttggtggtgcgtccgcgactgggcttcaggtgtactggcaatgaaataagccttccaagcatactgcttggagggcttatttgtctcttgagtcggctgactggtcgtgactaactagctaatagatttggctaaccagccattatctaataactggtgatagtgcttaccgattggcacccacagtttagcttgcagaatgctacggagctcatcccagaagagtggatcgcgttgttcattggtggataaattcaattttaagtaggcccccgtctcagtcttgacaatcacaaagggataaaagactttgataatctgggctgctataatgttagtcatgttagctgcttggtcaagtaacatattatcgtctcccgttacaatgcagatgattaatttcttaatagttctaggttagcagtgattattaaagaaatgattgcggaagcgttaacaatttttaaagttcagttagttaaaaccactaattgtgaaaattatgcgccggacgcttcggtggctttcagtagtggtatgattaaaagcgggttaagtttagttgttagaataatataaattttattgaaatcattgtctaaaaattattcggccgtggcagttccaaaaagaaaagcgaattattattggcttttcacgaataatgttcaatattggagctgttattcagctattttaactgaaaacagtgtagctgtttctcactattttatggatatcgaacaatatttagctactttttgacaaaattactaattatgtattaaactatttaaatagcattaacgaagaataaggatttcttaactctaattattaatgcaataattctagaccgtcagtcaacaggctgatagagaaagcgaaggtgactgcaatgtcaatgatcgaatttcacgacgtcgaaaagtattatggtgattttcacgccctcaaaaatattaatttaacgattaatgaaggtgaaaaagttgttttgatcggaccatctggctcaggtaagagtaccttgattcgaaccgttaacggtttggaacgtgtccagtcaggtcaattgttagtcaatgggtttgatttagccgaccgcaaaacggatatgaataaaattcgcaaaaacgttgggatggtgttccaacactttaatttgtacgctaacaagacggtgcttgaaaatatcatgattgctccccggttagtcttgaaacggccggaagatgagaataaaaaattagcgatggacttattagatagtgtcggtctggctgacaaggccaatagcttaccgagccaattatctggtgggcaatcacaacgaatcgcgattgcacgttctttagctatgaagccgaagtgtctcttgtttgatgaacccacctcagcactagatcccgaaatgatcgatgatgtgttgaacgtgatgaagagtgttgccgaagactccagtatgaccatgttagttgtgacccacgaaatgggctttgctcgtgaagtggccgatcgggttattttcatggctgatggggaaatcttagaagatgatgctaaagaaaagttctttgatggtcagccgtctaatgaacgggcccgtcaattcttgagtaaaattattacacactaatttgtaggggaggaccacgaatgaagaagctgaaacgactaattggcgcactcggcatgcttgccatgctagtggtggtcttaaccgcttgcggttcacggcaatcattagcaaaacaggatgttttgaccaatgataaagctagtaagacgattacgtggggtgttaaagctgatacgaaattatttgggttgatggacgttaaagataatcaaatcaaggggtttgacgccgacattgcgacggcattaacaaagcgggtgctcggtaagaatgctaccgccaagtttgtccaagtaacgagtcaaacgcggattccattgttgaagaatgggaacattgatgccattatcgccacgatgactatcacgccggaacgtgaaaaacaggttgattttacgaattcatactttgatgcggggcaatcactgttggttaaaaagggcagtgccattaaatcagttaagaatttgaataagtcgggcaccaaggtccttggtgtgaccggtgcaaactccgttgagaacattaagaaagcagcgcctaaggctaaggtgttggaattatccgactatgctcaggcaatgacggcgttgaaatctggtcaaggggtcgcgttgactactgataacgggattctttacgggatggcgtcgcaaaacccagggtacgaagtggttgggggtaccttcacgaaagaaccatacgggatcgctgttaataagggtcaggaaccgttaaaaaaggctctgaataaagcgctcaaagaaattgaagcggacgggacgtacaaccgcatcttgaagaagtggtttggtaacgtggccggcttcgactataaggaggcgtcacgctaatgggatacattctaacgcactattggtcagagctgattcaaggactcggatatacgttgttatccagtgtgattgctttggtattcagtacgatcatcggaacaatgtttgctatctttgaagttttgccaagtcgtacgatgcgcatcattggtcgagtttatattgaaattttccggaacattccattgttagttattgcgatgttcttctacgtgatcattccaatgtatgttgccaagattgatggctttaccgcggggacaattgggctaacaatctatacctcgtcattcattgcggaaacggttcgggccggaattcaatctgttgatcctggacaaatggaaggcgcccgtgctaatgggatgacgtactggcaggcaatgagtaaaattgtcttaccacaggcatttaaaatcatcattccaccgttgggcaaccagtttattaatctggtgaagaactcttctgtcctagctttcgtggctgggttcgacttgatgtaccaagcaaattcaattgcgtcactatcgcttgatacgatcaatagctacgtggtcgtaggggtcttttacttaatcattacgttgccactgagttattacatgcggcacttagagaaaaaattagcaaactagaagggggcgacgattcatgcaaaactttattcaagcgtattcgtggataaatatccggttcttgctcgaaggactctgggtaacggtggaagtgtccgtcgtttccatcattgccagttttattatcggttcagtcctaggggtgcttcggtacgtcaagattaaatatttatcggcagtggttgggtttgttgttgacattattcgaaacttgccattgatcttaattatcttctttacttactttggcttgccacacttgggattcaagcctggtatcattttcgcagccatcctcgctatgacgatttttgaatcggccatgttagccgaaatcattcgttcagggattttggcggttgattacggtcagatggaaggcgcccgggctaacgggatgagctatgtacaagcgttatggcacattgtctttccacaagcaatcaagaagacgatcccaacgattgtgagtcaatttatctcactgattaaggatacgtcgctggcaaccattattgtcttacctgaattattaaaccatgcgcaaattatttatggtcagaactcagcgtatattttaccgatgttcttaatgatcgcagtcatgtacttcattatttgttacgccttgtcaattctgtcacgtgtgttggataagaagttagcgtaattaaactggtgggatgatagctgaaattccttaatgaaaagaccaaacaagcaataatgctttgtttggccttttttataaaaaatatttaaatgtcttgcaaaaaatagaaggcgtgataatatagttactgaaaacgttttctataaaactgaaattaaggattgtaactcatactctttgaggcattaccttttacttgttgaaatatacgggtgaagtgggtgcctcaaggagtttttttgtattgaaggaggttcagtgatgtttggaattaaaagaaagaaagttgatgtcttcgaggtggttacaccgattgaaggtatttgtataccgatcacggccgttatggatgaagtgtttgcaaagaaaatgatgggtgatggatttgctattaggccgagtgaggacactaatcaagttgtggcaccgattagtgggaaaatcgttgcattacctgaaagtaaacacgctattgtcatcatggatgagactaggggcgtgtctgtattggttcacattggcctagatacagttggcttaaatggtagaggctttacggcacacgtcaaattaaatcaagaagttaaagcagggaccctattagtgacgctcgatcgccaaacgatggcgaccgcgggattagatatgaccaccatagttgtctttacagaaggttatacgggcgaaatgccacttggcagtaagcttcatcaacaattagcagccggcacaccagttttaaagcaagcataaactatgtaaaggagtgcgaattaaaatgcgggtggtgaagaaaattaataacaacgtggtcgtttgtcttgatcaacatggtgaagaattggtcgcctttggtaagggattaggatttcaaacagtcccgtatgagcttactgatatgactaaagtgacgatgacattttataaattaaactatcaatactatcaattactaaaagaaatacccactgaaatctttgatttgagtgcggcaattgttgagcgagcgcaggcactaattccaagaattttgaatccaaatatgatttttagcttagctgatcatattaactttgcaataacgcgactaacccattataaaagcgcccagttaccattttcatatgatgtggagcaattatacccacaagaaacggatgttgggtattacgccgtcaggttaattaatcgacggctaaatattcaattaccagtttccgaggtcacagcaattgccatacattttgtcaattctcagactaatgatttagcgaccaattcaagtgtaaatagcgacgatgaaatgataaaaatcatcacaaaaattattgaacaagaatatgagcttagaatcaatcaaaccgaattcacatacaaccggtttgtcatgcatttacggtattacattaaacggatgaagaaacatgagcaaatttctgaaaatgataattctaaattattcaatacgatgaggcatgatgagcctgaaatttacttggtagcaaagcgaattgcagactacgttgatagtcaacttgatactaatagtaatgatgatgaacttttctatctaatgatatatgttaaaagaatcgttaataaaataaatactcaagcgtaaccgttaattaatggaggtgtatgcgacatgaaaaataaggataaacagtatgaaaaagtggcgaatggtgtactggaagcagttggtggtagtgcgaatatttcttcggtgacacattgtatgacccgattacgttttaatttgaaggatgaaagtattcctaatgatggtgaggtacagaatattccaggtgtgattggtgtcaatcgcgctggtggccagtatcaaatcattattggacaagcagttagcaaagtttatgatgcgttacttacggtggggaatttaactagaaacgcgccaattaatgaagatttagataatcgacctaaagaaaagttaacgtttaagtctgcgggaaatatgattctaaataaattggctggatgtttaacaccattgattccgatgttgattgctgcatcaatgtttaaaatgtttgcggccattttaggaccaagcatgttcaatgttcttggtactaaaacatcgttgtatcagttatttacgttggttggtgatgctggattctacttttttccaatcatcttaggatatacagctgctaagcaatttaatacgtcacggattatttcaatgtttttaggtgcaattttgattgatcctaatttaattaaaattgtgactgctggcaaggcatttaatatcttcggtatcgcaatgccattagttaattattcaagtacggtcattccaattattttgtcggtttgggtaatgtcgtatattgaacggttctttaagcgttatgtaccagagtcgattagtacgattgttatcccaacgttgacgattgcaatcatgttgccgatttcgttatgtattttaggcccagcaggaaactttatcggcaattacatttgtacaggaatattggcttttggaaaattaggtggcttgccaacgattatcgcggttggagtggttggtgccttatgggaaatcttggttatgaccgggatgcatctcttaatgcttacgacgatgatgatgatttttgcgcaatcgggtcatgaaaactttgtcacacttggcgcagttgccgctagtatgtcggtcgcgggcatgtgtttgggtgcggccttacgaattaaggaccaagatcaaaagacacttgcttggggttatttaatcgctagtattatcggaggtgtgactgaaccaggattatatggactagcaattcgttataaacgaccgtttattggcatgatgattggtggattttgcggtggcttatatgctggcctgacaacagttacagcttatgtcatggtacctgttgcaaactttttatctttaactgcgtatgttggcgggcaaacatctaatgtgattaacggtgtggttagtggcgtgattgcgtttgtagcagctgctattgcaacttatgcgattggtgttgaagccaatacaaacaaacaggggactaaagaatttaaactagtggaggcttaaaagctaatggaaagaaaagtaatcgttcgagctgatgatttaggttattccgatgcagttaatgttgggattgcacgaacagttcacaacgggttaattaataatgtgggtgttatggtcaatatgccaacgacgatgtcaggattagccatgattaaagatgcaggggtttgcttagggttgcatactgttatatctgctggccggccattaacaaatccaaaattgattccgagcatcactaatccagatggtacctttcgtcattcctcggattatcgggcggctgttcatgattttgtcgatcttaatgaagttgttttggaaatcgaagcgcaatatcaaaaatttgtagcgttagttggtcgccagcctgattattttgagggtcatgcggtagttagtgataactttgttaagggattggaaattgtgggtgaacgtcatcacttaaatcttttacgctttgcagcaggcccagatagtccgagtgtgctatttaagggaaaggtattacatgtttttatggaaagtatgggcaaaaactataacccttatgaaacgttgaaacgtgcggcactagcccaatataatgacggctatgctatgatggtttgtcatcctggctatttggatgactacttattacaacattcaagcctgacagttccccggacgcaagaagtcgcaatgttaacagatcctcaaatgcaggaatggttagaacgacagcagatcaaattaatcaaatatagtgaggtttagttactaagcgttaaggtaatcggtaagcaaattaaatcacttatttcaatgcgcgttgaaaagcataaaaagagcgttgctactgaaaatatcttcagtaacaacgctcttttacaagttatcaagaatttaaattaagcattttgattttgctgctgcttccaataatagattgggaacccaacggccacgataaccaaggaaatcagtacaccagataagtctgagccaatttcactgataatcacgaacagtgcgcccagaatcgcaatcagcggtgtgatcggaaatccgggtgtcgagaatggtcgctcagaagctgggcgtcgttttcttaaaataaagacaccaacgaaggttgccacgtagaagcagtagaccgtgaagatacagaggtccgataagcgatctggattaaagaacaggatcataatactagcataaacgagaatggcaatggttgcggcgatcggctcgtgtgattttttgtgcaagtaactgagttgtttagcgaatggcagctgattctgagcagccatggcgtacacgatgcgggggaaggtcataatcttgccgtttaaacagcccaccatcgagatgataatcccaatgttcagtaggcgcccgccaattgtgccaaacgccgcttgggcaaagtacagcgtcgtttgttgcccgagtttgtggatcgttgccgcgggtacgaagtggagaatcccatagctgactaaggtatacgcaatcaagaccattgaaatccctaaaataatggcttgtggtaataacttctgcgggttcttgatttcgccacccaagttagcgactaagatccagccatcataggcaaaaagtgttgcgaggacggcaaccccgaaactacccgttgattgggtaattgtatgtaaagactgtcccagcgcgttctgattaccatagaagagtccaaaaataataatagccgcaatcggtaataatttgcccaacgtggtcgcaatttgaaatgcggcgccccaacggttttcgaacatgttgaggattccaatcaggacgatgacgccaattgaaagtggcgcctgccaacccgcctgcaggttgaagaaaccaactagtaatataccgaggtaagcgctaattgaagcgatgatagcgggaccgtagacggcgatttgcatccaaccagagagaaagccccacaatttaccatagatttgttccatgtagacatagagtccgcccgtatgcggcatttgggcaccgacctcggcgattgttaagcccgcggtcaacgtaatcagtccacctagtaaccaggcgagtaacgcagcgctcggtgagcccgcactatcaaggactgatgattgcttgaagaagattcctgacccaataaccgtaccaacgacgagtgaaagtgctgaccaaaaaccgagtgaacggttcagggtcgttgcttgctttgtttcctgcattaacctgaaatcctcccttgaaacaaccaaattctaaatgattgcacttagcataccagagattaatggtgatgacaatcaaatatcgttggttgtggccgatttttcaccctaaatccgaactaataacgatattttaataataaagttcgacaagattcaaaatgatcagtgttattcggttggtgattcgagtttcgacaaaataggattgggcagcatggtggctttaaattaatttatttatcttcctaatattagcaggggtatttaacgggtcaggttagtcattaacttagtcattaattgagttagttgtgcccactcggattgattgagaccacccttagcagtcaataaatccggcaaatcatttaaagcaagtcgtgttgcggttccttgaggtgtcagagtgagcaagatgctccgttcatcttggggattccgatgacgtgtaattaaaccagcttgggtcatccgctgtagcacgggcgtcagcgttcccgtacttaaatttagctgggtgctcaacgttttgaccgtgacagcgtgcggcggtgtcgcatagagtgcgactagaaccaagtattgtggataagtgagtcggtgtgctgtcaaagttggttggtagaggcgttgaatggcatggactgttgtgtaggttgaaaaacagacgtggtcttcaagggggcgaattgtggttgtcttcatgataattaccgcctttcatgcgatggagtattaagtgcggagacgttctaataatgattgtgcacaatcgattgattggattatagcacattctgacaatctgtgggcctagttgccctagtgccggtgggatcttatggtctggtggtcacgttcagtatgcaaactgatgattgtgggtaccacttgcagtgacgtcatggtaataatttttggttccttcctaaaaatacagtataatgctacgagtaggtaagagagtggggttagattgatggtaattgcaattgtggtgttgttgatgctgctcagcatcggcttatttgggttgctgttagccggtgccagacggcaagcagcgccattttttgaccacagttttggtttcggcatggttatcggggccgtgacggattttcttgacacacttggtatcggaagtttcgtcgtgtccacggcaatttttcaagcgagccattatttaaaggatgaacgtaagctacctggaactttgaacacgatgcatgcgattccgaccgcgtttgaggcgtttttctttgttacagcagttgcggtcgagccagtgacactgattagtttagttttagcagcaacgctcggcgcattactgggtagtgaagtcatgacgaagcttaatcagcggtggattcagttaatcatggccggtgcgttagtcatcactgctttactgatggcagcgaagttattaggttggatcagtttgctgggagttgctaatcaggcgacggggctatccggttggaaattattggtcggcattggtggcaactttatcctagggttactgatgtcagccggagtcggactgtacgcaccgtgtatggtaatggtgtattttctgggattgaccccgattgccgccttcccaattatgatgctgtcgtgcgcattgttgatgccgatttcggcagtgaattttattcgccatgaccgcgtcgattatcgcggcttattcggcattattttaggcggtattattggcgtggtggtggcagcgaccttagttaagtcactgtccttaacagccctgagttggttgatcgtcttagtgagctgttggacggccttttcgttatggcgtgccgcgcaacgccggaaaaatgtgttatagtcaacggtatgagtggttaggctaaccaagcctagccacttttttgtcgttgtttaaaatgattttcaggctgctagaaaaaatagcggtcgctggttgacaatttatacagctggctgtataaatgaaagggcaggtgattaagatgaatcatgatgaaatggtggcgcggcaagttctgattttagctcgtcaaatcaagcggcgtcgcaaccaacatttgcggacggtggggttaacgactgagcaagcggatgcactgactttttttacggatcagccaggtcgcacggtaaccgcgtttaagacgtaccaggaaatcacccatcagacggccaggatgatcgtgcaacgcttgcagacgcgcggatatgtccaattagtggtcagtccaacggatgcgcgtgccaagcaagtggtagtgaccccgagtgggcgtgctaaacgcgagcagctccgtcaacatggctggcagacgagtgcgcaaatgtttgcccatttggatgccgaacaacaacaggtatttttagatttgttacggcaagttaatcagaatttagaaagtgatgagaattgatgaagacgcgtttatatacgccggatgtaaagttagtgttaatggctagtttcttctttttaatgagtccaatgttaatcaatcccgtgattgcaggatttgcgcacggtattggcgctagtagtgtgcttgccggtacgattgccgggttaacgaatttgacatcgctagtgctccggccacttgctgggaatttaaccgaccgggtctctaagtaccgtttgaccttcgtggggggctgtttgttgctactagctagtttaggttatagtttgacaaccaacgtgacgttaatcatgttattgcgaattttgaatgggttgggatataccttgtgttcagtttgcatggcaacctggatggctagtttattgccacccgatcgaattggctctggaatgggcatttatgggctagcgaatgcgcttggaatggcgtgcgggccggcaatcagtgtcttcttgtatcaacattacagttaccagagtgttttttggttagcagcgggctgtagtttactgctcgtcatcatgattcaattcgtcggtgatcatggtgaaccaattgtgacgcctcaaacggctacgactaagcaccatattcgcatcgtacaaccacgagtaatccccgtggccttgattttgcttttattttcattaccatattttgccacccaaacctatattgtcagctacgtcgctgcacggcattttcatgtggcagcgggggtatttttcccggtgtacgcgggtattttattagtattgcgaattattctccgcgattggttcgaccgggtgccatttaaacggttcatctggttatgcttaatttttaatctattaggattgattggcttaactgacatgaacaattgggcgatgctactgctgggtgcagcaggactggccgccggatacggtttgatgttttcaatttgccaagctaaagcattgatgctcgtgccgaaagctgatcatgggctagccaatagtacattttatattggtgttgatatcggaatgtcacttggccccatcattggcgggctgattagcagtcaattaccaatggcgtggttttatcccgtgatgatggtgacgctgccattgattatcgttgtttacctagtcagtcgtcggcagttagcttagccaccaacatgctggagaaggttgttcttggtatacacatgattatgaattttttcagtaggggatatcaaaaagtcacttcaagtttacgactgtctgaagtgactttttatctgcctttatataaacattttgatgccaaaataaataataataagaccaagaaatggcgttaatacgcggttgaccttatctaaatttaaatggcgaatcacgagtggtgtaatgattgcgccgataattgcgccaatcattagcaccactcgtgattgccaagcaaaagtactagtaaagagatgaccgattaaactgattgtggacataacagttaacacataggtggcagtaccagcggcttcaacggccgttaacccaagaattgctaacccggcagccgtggtcgcaccaccgcttaagccgccaatgccgaccatcaatccacttaaaaggccaaagaaggcagcttgccaaggttggtgaccggctgtagtttgtttagaatggtgaacatacttgattagtaccatcgcacccataatcaaaaaaattgtcccgacaatccagttatacagttgttggggaataaattgtgcgctgaatgtcccgacgatgataccgggaacggccgcaataatcatttgattgccaatcttgaaattgacatttttgattttcaactgtgttagaaaaccaaagaataaggctggtaaggcgacgattagggaggttggtacggctaccgcggttgcaaggcctacttgactggttaagacacctaggtatagggcagcacctcctccaccaatcagactaacgaagatgccgattagtaatccggataaaaagacaaacgtagtgaattcccccttaaattgtataattataccttaaacggagtacactccgtttgtcaagtgatgcgtaaaagtgtatggtgaacttaagtaaataggagggtgtgtcgaatgcgaaaggatgcacaaattaaccaacagaaaattttgactgctgcgcgacaactctttgccgtgcgttcaatcgaaaccgttagtatgaaagatattgcgacggccgctggtatcggtcccggaacgttgtatcgtcactatgcccataaaagtacactatgtttggcattggtaacggaccgagtcgcaacttttattaaaaccaatcaagtctacttgaccacgacctcggtaggtgcagcagcacgttttgatcatgttattggggaatatttagcgattcgtgagcacaacatggcgttattaatgaatgtcgaggccggtgaacctggtcgccgtcaattttatcagagcgaactttatcaacaattatgtgacctattaacgcaactggttcgtgatttaaagccaacgctttcgaaaccggcatgtgagtttcaagctgatatgttaattgccatgctgaaggggactagttatgcttttcaacgtcaatggcgaggacggtcgcagtccgaactattggcgcaattgcacgcgttaatggtgactgaatgatgttcactattggcactagtggtttggcgattaacagagtgggttgattgttaaatcaaaaaagatggttctaggcggttaatcctagagccatctttttgaatgagtcatttaagcaggtgtcaccacgtatttttcataacgttgggcatcgacagtgttgagttcgactgttaattgggtgccatcagctaagtaatccgttttgagaatgttggcgtggtcatttaagtaagccactacttcaccatcattgaacgggattaataacgttgttgtcacgtaattcttaaagactttggctttgatcatactggtcaaagcttgtagtgaggcctcatcacgcgccgtatagatgagttgatcatcttgctggttcgggtagtcggcttcggttaaatcagctttattgaaggcataaatcataggaacatcgtgcacaccgatttctttgagcgtcttttcagtggtcgccatcatttccttgtaatggggatcggcgtagtcgatgacttgaatgagtaagtcagcattggcagcttcggctagcgttgaacggaaggcgttgatcaagttatgcggcaagtcgctgacaaacccgactgtatcactgagcagtaactgcttattgtcagggaaggttaactgacgaatacttgtatctaacgttgcgaaaagcatgtctttttcgaagacttgcttatcttcacccttaccgaacagtttcactaaaccattcatagtcgttgatttaccagcgttggtataaccgactaaagcgacgttggggagcccagctttatcgcgttgtgaacgtcgcactacttcgtctttattgagttccttaagttcgtgcttcgcgtgactgatccggtcttgaattgtccggcgatttaattccagttgcgtttcaccagcaccacggttggtaaagcccccgccaccaccagcagcggccccagcctgctggtcaaggcgattggagatactcgttcgtaatcggggaagttggtattgtaattgggcaatcttaacttgcaatttggcttccttgctccgcgcacggttaccaaaaatttctaagatcagaccagtacggtcgatgatctgaatgtccgtttgttcctctaagttacgcacctgactaggggtcagatccgcgttgatgaccataatgtgcaaatcgttggcggctgcgacttctttgatttcgacaactttacctttgccgaagaaggtggccgggttgggtttttccaatccttggtcaattcgcagggccgcgtgcatattattggctgcaacgagcgcttctagctcggacatggcgtagtcgtaattggcgaccgttttagacatgccggcaatgatgacttcttgtactttttgagcgttggtttcagacatacactcactcctaacgtgttatgattgcattaagtataacatgtctaatcaaaatattacgacttcgggtattagggaggaatcaaaaatgggttacgtgcttgatttgcggcggcaagttggtcaccaaccgctagtagtggccggtgcggctttaatggcccaaaattcgattggcaaaattgtcttgatttatcgaaccgataaccactgttggggcttgccagctggatcgactgaaccgggagagacggtccagcaaacggcgcgacgggaattgaaagaagagactgggctgacggtgggtgagttaacgctgatcgatgtctatagtgggcccaagatgcactatcagtatcctaacggggacattattgacagtgtcaccacgttatatcgcgccaatacaacgggtggtgaattgattcaagccaccgatgagacgagtactgcggctttctttgctttagatgctttgccgacaccgttgaccccactgacaaagtggatgctttgcggtgagtaagcttgaccatgcagatgaggtttgctatagtggactgaaatattaagatgaattgtcaccggacaacgttaacccaacttccttaggtcattgtggaagttgggtggacgttgtcctttttattttgaggaggaattgataatgacgtggatttatttaattattgctggattatttgaagtggtatgggctacgatgatgaaattaagtaatgggttcagtcactttggctatgctgcggccacagtagttggcatggtcttgagttttggcttcttagcattagcaaccaaacacttaccgttgagtattgcatatccaatttggaccggtatcggtgcggtcggtgcgataattgttggcctggttttcttcaaagatacaattgcacccatcacgtggatcttcattgcaatgctggtcattggcattattggtatcaaagtcacgagttaggattgggggggtgttagtgggtttgtgattcatcagtgaagccccaacagcttttcaatatttttataaaagaatgaccacaagcatgaaagcggtgttataataactttagaagttaaatgaatatttgggttattcttagacttcttccgacctgagatagacgcactgttgccaagactttacaaaattttcttgttacacccggtcaacgcactacctctcggaggggtttcttaatttcgtcagtaattctgtgtatagtcttggttgagtacaacaaatagtgaaagaagtgacgtctgatgatgatgtatccgtatctgaatttaggccccagagatggcgtcttgataattgcagctgctattatgttagctttaacggtagtttttaattggtcagtctgggaacttttgtttgctgttgtggcagtcgtaattgcgttcttagcaggaagcatgaaaccgtctaagaagaacgtgcttgcttttttgaaaaaatagtttgaattggggtagcatacctgaattcttcaaacacgtctttaaccagcaaagtttaaggacatcattgataagatagccctttaaccagcaaagtttaaggacatcattgataagatagccgagttggttctctgtcaattgatgttgcgaatagtgctacgggtgcttagtcaaacaatggcgagcacctttttcaattcgaattgttcaatagcccatgattaaaatacaaataaagatatctgtcgccagtaatcacgtatttagttaattaccaacaacagttatttcagagccaatataaaaacgctcgcgaccagtcagtggttgcgagcgttttgtttgacgagcaaaattataagtgttgattgactttcacgtcagctaagtcttgcgcataatcgacgacgcgaatttgatcgtcatcgatgtcgatgcgagtgacgctcccgtttttggggccgttcgtgatgtcgatttcaggagcaaaatgtgcgaccatactgcggattgtcgtgccgtgggtaaccacgaggactttttgatggtgatcgtggtgagctttcaagtagtcaaagccctggttgatccgttcccagtacatcgagttgtcttcagcttcatgccaagggtcgatttcacgcatcaggtcgcgagtctgatcgataggcacgtgttcaagaagttcgtgcatgctggtgaccccgtattggcggccaactagtgaccaggtccgacttgaatcgtcaccttcgaaataaccatagaaaacttcacgaaagttcatcagtgttttaaagggctgggcggtggcacccgccgcttgtcgaatgagctgagcggtgtcgattgcccgcttagaatcactgctgtagtagtagtcaaaagccgtgttcgctagtgcttgaccgaccttggttgcggtggcttgtccgtattcagttaacggcgagtcagaccagccttgcatgcgattatataagttgaaaaaagtctgtccgtgtcgaacaaagtaaattgaaaattgagccatgtgtttctccttatttagtcgagatggtctttgcggccaaagtagtctaacgtcacatcgttgtcgctaattgtgaatttcgtgacgctcccattttggggccgtgctggtgaggtcagtgcggcaaaacgagcagcaatactgtaaatcgtattgccgtggctgacgaccaaaactttgtccccgtcgtgatggtgagcacgtaacgtatcgagaccgccattgacccgttgccagaattcggcgttattttcggcgcgatggaacgggtcagcttctttacagaaatctttggctttttcgatgccgtattgttcaataattgcggacaaactaggtgcttgatggggcgcaccaaccatgaaccaggtctgcgacgtatcatcaccttcaaaatagccataaaaggcttcacggaaggcagccattggttgaaccgtcaaatcggtattgccactggcaggaagaattaattctgcggtgcgcattgcccgggtcatgtcactggcgtaaacggcatcgaaatcaataccgttgagcattttacctgcattgcgagcgtcctgttcgccgacagctgtgaggggggaatcacaccagccctgcattcggcggtacttgttaaagtaagtttgaccatgacgaatcatgtaaacggaaaaagttgccattatttactcctctacttggtgttcaaaactaagccataatgtgtttagtttaccataaaatgcactgcgattaattagcagttgctaaggcttgtcgaatctgagcggccgtttgcttattcccggtaaagattaagcggtcaccgtacataatcgtcgtatttccattgggcgcgatcagtttccgattacggatgacttgactaatggtaatatcctgggcaaactgtaagttcttaatttgaacatcagtatagagatggttgaggacccggacttcgtagatgctgttttcagtatcattgagcaatagcaaggttgacggtgattcaattaaggcgcgcagtaaagtaatgttggcctctggtgtattgtagacttcgacgcctagttctcggagttcatcttcatgttcgttgagcacattgcggtcttcaaaccgaacgatgatccgccgtacaccgtatgctttggcggctttagcaagctcgtagttacgttcggcatcaatatggccgagtaccaaaatatccgtgtcaaagacgccgtgatcctgtaagtcctgggctgtgaagttttccattaaggtcactggcacttgcgcgtggtaggtttgataattctcaggatgattcgtgtacattgacacgtcgtaccagccttttcgtagctgttgtgcaacgggtacggtgcttaagttagcgccgataaagtggaccgctgttttgaccaggtcttctttttcagctgaataaaacttgttaaaaatcaggggtgagatgacacaagtgagtagcgctgcgagtaagaaagcgccggactggtcactagtaattgtcttcattgacttggcaactcgaagaacggctaataccattgtcattgtcgttgcagtcagcgcggtaccggctaaagcattggcttgcttgaaccgtaactttaggacccagtagccgccaatcttggcaaccatgtatgctaagaaaaatagtggaattaatagtaaggttttgccacttgttaataaggtccgtaagttcaaatcgacgccagtcgtaatgaagaaaatcgggatgaagaagccgtaaccaatagcatccaagcgttcgcgggtcgtttcactagggttcaagagtttcaagacgattccggccacaaaagcgcccaggatgttttcagcaccgacggattcggccaccgtgaccatcgttacaatcaagaagaaggctaaccgaatatctagttgtgtcgtcgatttgttaatattttgatagaagcggaagaatggtttgaaccgtaagagtaatagtgcggcaacggctaaaatgagtaatagtaaccagagactttgtgagttactgccgtagacggatgcatagagcgtcagtcccatcatcggtacaagttcaccaaagaccgagatgagcagaatcgtttgtccgaaagccttactaagcaattcctgttcttttaaagctgcaattacaataccaagtgaaatcgtgccaaataaaatcgcggcaagccagaaatcactgaagaggccgctgactttaaaagcagcggcgagtaacagcgatagaacaataattgtgctgtaggcgtacaccgaaagtcgaactggcgaatatttcggtgtgttgaccgcgtttttttgttctaaaggtgttaacgccgtgcgccgcttcttaaataggctaaagtcaatttcaagtccacttaagaacagcaggacgatgacgccaatcgttgagagttgtgagataaggtcagaggtgttcacaaagttaaacacgctggggccaattacgataccgacaatgatttccatgacggccgttggcaaactgttgattttgaatttagccatgataagcggaattaataatgcggctaataaaataatgactaaggaaacttgatccatgaataaatacctcgattcgttttagtacacacggagctgatcatcatcaaagccccagaaagcttcgctagcatgtgcatcggtgaaaactttcaggatttggtcgacaccaggggctaatttgtcaggcgtcagttggctcaatggttgccaactaatggcaccctcgtatgagccggctagcaaatcaccgtgatagtgactagtggtgtataaggtaccaagcgacacgtcgccgtccgcattttcgacccacgttacggtgccaactaatttcaattgatcgacgtgcaagccggtttcttctaatacttcacgcttcatcgcggttacttgtgattcaccgcgatcaacatggccgccaggaaaagttaaccccgaccactgtgcgtcaatcttattttcaaccaggacatcgccggtcgctggattggtgatgaggcacatgttgacgagttctgcacggacggtccggtcgtggtgttcatgctgatccttagtggctaaccagtcttgggccttgtcattgatgcttgccatgaatgctgctttcgtttgtaggtaggctgcgagatcggcttgcccattgcgcacaccttttttgcgaatggcagtatacttgcggccgtctgtccggtgcgcattgagataatcccggaaagtgagcaattgctgataatgctgttcatcagttgtaatgatcacgtggatgttgttagcagctaattgcgtcgcgtaagtatgcgtcgttccagcgaccggtcgtgcgtgtaacgtagctacggcagccgcctgatctttaacaagcaacgccaagtcaattgttggacgcgctaataattggggcatggccgtactacccacgtgactactttttaatagattcgcctgtaattgctggcgtaacaaggtttgatactcgattgcttgcttttgccagtcagattgataggcagttaattgaattggttgcatagaatccctccactcgaataagtcattgaaaggatacactttttgagtggttttgaaaaggaaagacgtgcctttcaaagcgagaagcaataaaaaaaacacgattgcagatcaaccgtgttgtgtgtggcgcttatttgagattgagtgttgtccgttgtcgccaggtcttaatcagcgcaaccaccgtggctggaatgagcgcggcggccataattcctagaaaacagagcgagaggtggttttgtacgaagctgatcgagccaaagaagtaaccgagtgaacagccgacactgacccagataccaacgccaactaagttccagatagcgaaggtcgtttgtggcattttagcggccccggcactcagcgggacaaaggtccgcacgagtggaacaaagcggccaaacatgacagctttcgcgccatacttagcaaaaaattgttgtgcgcgttgttgcttggattgggggaggtggcattgcaaccacggtaagcgaatcagatggcggccaatttcgaaattgacagtgtcgccaattacagcagccacaaagaatactggcaccagaatctgaatactgagggcgtcgctgtgagttgcagccatcgtgctggcgagaaagatcaatgattcgccgggaagaaatgggaaaacgaccatgcccgtttcaagaaagataacggcgaataataagatgtaagaccaactaccaagcgtggttaatagtgggacgataccttgtcctaaatgggttaaaatggttattaaattgaccaacggcgccacctccaatttaagttgcatttattataagcgtctgcgggttgaaaaacagatgtaaccgattacatttctttcagtttaacataatcgtaactttgatagaccaatgttcaaacaaatttacataaaaatcaaaaactggcggctgccatgggttattaattgagtcgggccgccgatagtgataaaattattgttcgatatttaggaatggagggcgttcaatggctaagtcaattaaagctgcagaacaggaacacttagatcatgtggttgcgaaaattaaggtggctgaagaacaacaaagccaaaccattacgcgctcggaaaaagatcaggccgatattaaacgtgacttgctgaataacatcaatattaaaacggatagttacgaaggcatgatggagaccggattatccgtgcggcagcaacaacagatgatggatgagcggcagaatagttggaagcacgcgactaagcaattatcgacgttaaaaaagttggaaaagaatgcttattttgcgcggatcgattttcatgagactggtgagcctaagtctgagacgatttatatcggactcagttcattttctgacacgccggatcactttttgatctacgactggcgagcgcctatttccagtatttattatgacggtgggttagggcacgtgacgtaccagactccggatggtgaacagaccgttaatgtgaagttgaagcggcagttgatggttgagaatggccagatcgtgacagtctacgatactgatgaagccgttggtgactcgatgctactagaagtgttggatgaaaagtccgatgtgaagatgaagagtatcgtgacgacgattcaaaaggaacaaaataccattattcgggatacgagttctgacctcctgtttgtgcagggggcggccggttccgggaagacctcgtccgttttacaacgggtcgcatacttgttgtatcgttaccggggtaatttgacggccggacaagtcatcttgttctcaccaaatcaactctttaatgattatattaaccaagtattgcccgaactgggtgaacaaaacatggttcagatgacctatttccaatacgcatcgtaccggttaccacacatgcaagttgaaactttacagcagcggtttgaaactgaaaatacaccgcagatggcaaagattacgaagttggaaggtagcctcgcatttttcaacgcggttaccacgtatggccgacatttggaacaagcggacatgcgtttccgtaacattacgttgaacgatgaagtgattatttcccgggaaaagattaaatcgatttactactctttcaacgaaaactaccacttagcgaaccggttatcagcaactaaggaagaattaatcaagattttgaatcgcaaggttgaatcggagatgcgttccaagtgggtcgaagaagcggttcaagacttatcacgcgaagagatcaatcaattatatggcaatcagccgcgggaatttaagaatggcgataaagagtttaaattcttagcacgtaaaattgtgatgcaacgcttaggaaaagcccggacgcaaatcgtgcgtaaccgtttcttgagcatcaacatgcagtacgcgcatttcttacgcgaagtaccgaagatcatcaagttggctgatcacggtatctcagctgctgactgggatgctacggttgaacggaaactagccgagattaaggaacgtcatatctcgttaacaacggtctcagcttacatgtacctgcatgacttaatgaccggaaagcacgggcagcgtgacatccggtttgtcttcttggatgaaattcaagattacaatgcctttcagctagcgttcctgaagtttagcttccctcaagcccgtttcacaatgctcggtgacttgaaccaggcgatttttaccaaggaaaacagccattcgctgatcaatgaattggccacgttatttgaccctgaaaagacgcgggtcgtgcaattgactaaatcgtaccggtcaacacaacagattactgatttcaccaaggaaattttagtcaatggtgaagccgtcacggcttttgatcgtcagggcgacttgccaaatgtcgttgtgacgcctaactttgaagcgggggttgatcaagtcgttgatcagctagcgatgaacgattctgaacgtgatacgacggcaattatcgggaaatccttagcagaatgcgaggcgctcacgaaggccctgaaagctcgtggtgagcaggtcacgttgattcaaactgaaaatcaacgcttggctcccggtgtcattgtagtcccgtctttcttagcaaaagggttggagtttgacgcggtcattgtgtggaacgctaatcaggaaaattaccaacgtgaagatgaacggcaactattatatacaatctgttcacgggccatgcacgagttaacgctagtcgcggtgggtagcttgtcaccgttactagcgcgggtgaaccacgccttgtatacattaaatgaagcaaaagtttaagtcagtttaagacagtgagtaccgctccattcacctggagtggtactttttttagttttacttgtgaaggaaatcttaaggtgcgtcaggatgatcagtagtggaacagttggggacttgtgtcggaataactaagaaaacgctatcataacgatggaataagcgttaaaattaactcatcaagtgcagtagtcggtgagagacaatgaccttaatactgactaggcacataatatcgtgaaaatactaacaactagttagaacggttgttagtgacctgaggaggaaacgacgatgtcaatcactgaaatgttaggtattcaatatcccattttttctggtgccatgatgcgaattgcgacccatgaattagtcggggcggtttcggaagctgggggactcggtgttttaggttcagcggggttatctgccgaacagttgcgagcagagatccaagcgacccgcaagctgacggataagccgtttggtgtcaatttaatgttacagatgaagaactgtccagaactggtccaagtcatcattgatgagggggtcaaggtcgtgacgactggtgcgggtaacccgacttcatatattccgccgctacacgcggccggtattaaagtgattccagtgattgcttcggttcaccatgcccataagatggtggcggccggtgcggatgcggtggttgctgaaggtcaagaatcaggcggacatatcggtcaaacgtcaacgatggcattattacctcaagtcgtggacgctgttgatattccggtgattggtgctggcggtgtcggtgatggccgctcgattgcggcgatgtttgcgctgggcgcccagggtgtgcagtgcggtacgatctttctgacagctgaggagtgcccagttccagctagttataagcaacgggtattggctgccagtgacacggatacaatcgtgactggccgcagccagcgcgatccggtacgggcgctagttaacccgatgttggcacaatacttgcgattggagcaaactaacgcgccggtagcggaattacacgcgttagcggacggttcatttgcgaaagccgttgaagatggcgatatggaacatggtacgcctatggccggtgaagtggcggggatgatgacgacaattcggccagtcaaggaaattattacgacgttgtttggtcaggctcgtgaggtcgcggcacaactgaaaatcgaataagatacagtagcatagctcggtactaggtcagcgttaactagtatcgagctattaatggttattggctaccaattaggaatccggttaatttgaattttaatcagcgtttgataagggtttcatgttataatcaacccattaatttagtaatggtggcagacagaaatcatggaagatcagatgaactattatcgcttctcacgtgaacagtggaagcaattttatcgtaacaatcagcatcaagtaccattgaccgcagccaatttgcacgaaattgaggcgtttaatgaccggattagtctcgacgatgtccgtgatatttatatgccgtttgcgcatttgttgcaggccaagtatgaacactacttgtcatggcgggaaacggagtccgtttttttacaccgtcagaaccgccaatcaccctttattattggagtgtctggaagtgtggcagttggcaagaccaccacagcacggttattagagattctatttaaatatttatatccagaccggcggacgcaattgattacgacggatggtttcttatacccgaatgccgagctcaaaaagatgcaattgatggaacgcaaagggtttccggaaagctatgatatgacgcggctgatccaattcttgaacgatgtgaagagcggaaagccgttagcgaaggccccggtatactctcatcagacttatgatattgtgccaaaccgttttgacgtgatcacgcatcctgatattttgattattgaaggaatcaacgtgttgcaattgccaagcaatcaggcgatctacattagtgattttacggacttctcagtgtatgtggatgcggatgccgatttaattgaagattggtacttagaacgcttcaaggccctgatgaaaacggctttccaggatccgacgaattatttctatccttgggcgatcggtgatccgaaggacgcaatggcgatggccgagcgtgtttgggaagaggttaacttgaaaaacttgaatgattatatcttgccaacccgtaatcgtgcggatttaattttgcacaaagttgcgcatcatgtgattgatgccgtgtatttccgcaaatattagcacctaagaaatttctcatactggttgaccgaacgtttagaaatcagtatgatagacctattgagcattaattaatccaaaggagtgaacaacttggcaaaaacggataccgcgtctttcgattccattttggtattggatttcggtagtcagtataatcaattgattacccggcgcattcgtgatttcggcgtttattcggaactacttccgaacacgatcaccgctgaagaaatcaaggcccgtcacccgaaaggtattatcttttctggtggccccaacagtgtttacgatgatggcgcctttcgggttgacccggagattttcaagttgggcttaccaatcttggggatttgttacggcatgcaactgatgacctacacgcttgcgggcgggaaggtcgaatcagctgataaccgtgaatacggcaaggcgaacattgacgtgacgagtgactcggcgaccctatttaaggacacgccagctgaacagtcagtgtggatgagtcatggtgacttggttactcaagcacctgatggttttgacgtggtggccacttctaagaattgcccgattgcggcaattcaagatgttgaccggaagttatatgggattcaattccatgctgaagttcggaatacggactacggtaatgatattctacggcactttgcatttgacgtttgccaagctgaagctaactggtcaatggatgatttcattgatatgcagattgaaaagatccgcgctgaagttggcgacaaaaaggtcttactgggactttccggtggggttgattccagtgtcgtcggtgtgttattgcacaaggccattggcacgcaattaaccagtattttcgttgaccatggtttgctacggaagggcgaagctgatcaagttatggcgagcctagaaggtaagttcggcttgaacatcatcaaagttgatgctaaggaccgcttcttaagcaagttggctggtgtcagtgatcctgaacggaaacgtaagattattggtaacgaatttatccaagtgtttgatgaagaagccacgaagttaaacgggatggaattcctcgcacaggggaccctctacaccgatgtgattgaaagtgggacttcaacggcccaaacaatcaagtcacatcataatgttggtggtttgccagaagacatgcagttcaagttgattgaaccgctacggacgttatttaaggacgaagcacgggaactcggtgaaaagctagggatgccgtctgatcttgtttggcgtcaaccattcccaggccctggtctcggaattcgggttattggtgagattacggaagataagttagaaattgtgcgcgatagtgactttatcttacgtgatgaaatcaagaaagccggcttagaccgtgaaatctggcaatacttcaccgtattaccaggcatcaagtcagtcggtgtcatgggtgacggccggacctacgattacaccgttggtattcgggccgtaacatcaatcgacggtatgaccgccgactttgcacgtattccatgggatgtcttacaaaagatctcagtgcggatcgtcaatgaagtcgatcacgttaaccgcatcgtgtacgatgttacgagtaagccaccttcgacaattgaatgggaatagaatttattaaaattaaacgacttctatcccattagaacgagattcgtaaggattgcaaagttgataaatttaaagaaaatcactaaaaaagtggtaccgaaatggtaccactttttttattttgaatagcatatggtacaaaataaaaaatcgtattgaaagctatcaaagataaaagatactccgtttacgagagcatatgttagggcagtcggacaagtatcaatatcagtgtgtactggtttaactagtcgatttctatcgttaacacatgcgttcttttagggctgatattactaactgattgtaaattagactatgcttgtggttgactaaaatgctttaatgaagctaaatataaagatccaccaataattgcgagaattccgccaatccaacccaagaatggaataagcgcgattgcgccgccgacaattagtaaaacgcctgatgcagtaccgacacgcttatcacctttataataaattaatgcaataattcctaatgctaaaatagcaattttcaaaatgtttaggaaagcggccgcacctgatgtattagatactgatccagtggcagcatcgctaacaatgccaccagcaataaaccagcccccgaataataaaataatgccgccgactagccctacaatcccgttagtaagtgctaaattttttgacttcatgttgaagttcctccctttattaacagcttttcgtgtcgatcagtttattggacataagttgttgaagcctacccaaaccattaatccccgtattgataggcttatttttcgtataaataaacaaaggtgaccaatattctagccgataaataagctttccataagcgtgtccgtagtaacttggttcgaacattaagatacttcatcataaggggcgttagtcgcgtttagccctattcccagaagatgacggccattgctactcgtacttgttggcgttcttcttccgtaagtgcttcgcctccgtatgtcatcgaatccacatgagctgtgagaaagtcttttaagtcagtggtatcttttctagcaatccatttagatgcgctatcttcacccagcaggtagtcggttgtcacatcatatagatctgcaatctgtttaagcatgttcaaatctggctcattcgtgccatattcatagttggcatatcgctgcatactgctcaaccctaatttcctggccacctcagttttcgaccagttccgactgtcacgaaggttaattagtcttcgaatgaagttgttttgtgtttttgctggcatgttatagtctcccaatgaacgtattgtataatatttaaacgtaaaatttatatttttaaataaaaaatttaagaaataacttatttaaataaactatttaatataaaacgtgatttatcgatataaattaattgcttgttaattataatgcattcagtttgttagagcgaattcgtggttaaacgtaaaggttgctaagtgtttgtattttcttaacattgaatgacaactaatttggaggtgcaataatctagcgttctgttttttgttgaatgactaactaaaaattggtaggttgattgttagcttaggttgtcaggataagtgaaagaactgtacaatgaatgtaattaaatttagagaagggggagcaacgggtgaaattatttcaaaccaagcatattactgtaagcattgctaaaacaagccatcgggagaagctggaaggtctggttttctggggattattattgttcctagtgatttggcgaagaaagcggtaggcgtatcgttatgaatttatggaggattttagggtgaagaataagcaagctaatcagattttaagagcttgggatttagctgaaaaaattagtggtggtgagcttgacaagaaggctaaatggtttagtggagacatacgaaaaacagcgtatcagaagcgtgaatcaggtacaataaatgaaaaaatatctcaaaataatcaatcaagtgatcaacatgtgacgatttcacttttgtacttaggtgcatataaaaaacaagatttacgagatagcattcaaaatattcgttttagagatacggaaatggttcaaaatcgtgatcctgctaagggttatagtgtggcattaatcgttaatagcgactggtcctttcaaaaaattgaggtaccttatgcagcttatttttatttgaagcttcggcaagaaaatatcgaggaagcgatgcatggtcaacaatatgatgacttcaagagccaattgtcgcaacaactagaagaagttattgatcgaaaacgagccgacttagctgagtgtttggcactggctaaccagattgtactgaagacttttaagttagcaggtacacgtaacgtcggtcagttgcggggactctttcaaatccaagatgaacccccgatgttaaatagtttctatactgaggatattgagcgtgtattgcaggcgtctgcggacgattcattactattgaagtatttaggtttaaatcctgatgttgcgacaaagcaagaagtggatcagaatcgagattttatttcaaaattattggatgtagaaaatctaccagatggacggtggcctggacctgaaaagtactttcagtcattgatgcagcaggtggcagtcaatgtgattcgtgacaagggaccaattaagactgatctaaaaacagtgaatggaccaccggggaccggaaaaacaacgctattacaagacgtgtttgccgatacgatcgtacaacaagctaaagtaatggcacaattggaaaagccaatggatggctttcggagaattaaacccattgagttgttttctaactgtaagtataatgcctatgaattaattcctgccctacaagggtacggtattgtggtgacgagcaataataattctgcggttgccaatatttcaaaggaatttccgagtcgtaacaaaatcagacagtatcctaacgagaatcgtgagaaacaagatgagtatcggactcagctagaagaaattgactactttagcgatttagcgaatcgcattttggagacagcggactcttggggaatgtttgcggttccgatggggagtaaggccaatcagcgaaaggtatttaaacatattaatcatggcgtattaaagaaacagttaagtgtatactcggatagttgggcggatgcacgacagaattttaatacggcattggaggcagttcatcaggaaaaagcgcgattacatcgaatgatttcaatcgttgagcgggccaatccatccgtagttgatcaggcttaccttgagttgaaagttgtagacgaggggattgaggtactaaatcaagaaatcgctaacttgacacaaaaaattgagaatacaaggcatagattagtaacattaccgaaaaaaagatttttgattttctggcaacacgaaacgccaacacatgatagtctaagatttcatatttctaatttgaataaaaaaattgaaggactcaatgaacgagtagcagatcggcgaaaagaacgccggcatgttgttcatttaattgcacagcaggaaaaaatcattcgtgaagttgaaccaatccaaaaacaattgaaaaaagagggaatcgttgtttttaatgatgacttctggagacagacgaatgagaaacgccaacaggctttgccgaacaatagtagggttctccagaacaagcgtgcaagattattcattgctgcaatgcggctacggaaggtatttatttgtgaggcacgtgttccaatctcgaacgcttgggagtttttcgcgcatcaggataagctagtctttgctgaagatactttggccctaactgctggttttcaaattatgcaactgttgattccggttatgagtacgacgttggccagtgttggacggatgtttgccaattttggtgagaacactatcgataatgtttatattgatgagtctggtcaagcgacgccggcttctgcggttggtatcgcgtggcgtgcaaaacatctagtcgcgattggcgatcctgcgcaaattgaaccggttgtgacgactaatgaggcgacgttaagaacgattgcgcgtgatttcaaagtatcagaacaatatttgctgccgacgacgtctgtgcagcaacttgcggatcaaggtagtatttatggtatgcataggtccaatcatacatgggtcggaataccgttatgggttcatcgtcgctgtgattcaccgatgtttgaaattgcaaatgaaatttcttatgagaataagatggttcagggaaagccgacgaagctgtctcaggttgaacgtagtcgctggattaactcaaaaggaaaagcaacgaatcaacaattcgtccctgaaaatgtgactgctttggcacgaataatgaaaaagcggcgtgatgaaggcaaaagtttggatcaaatgtttgttatttcccccttccgtgcagtggtcaacggtattactaacaagttgccaaaagaatttaatgacggtgcgatttctaagaaatggttgcaagaacatgttggcactgttcacagatttcaaggtaaagaagccgatgttgttttcctaattattggaactgaccaagatactgacggtggcgctgactgggcatttagtaaacctaatttattgaatgtggcagtgacgcgtgctagacatgatttttatttgattggtgattaccatcggctcaagagtaagccttatgctgaggtagccgctcgtgagttgccattattggataattaagaagttattgattgttactttttaagttgtatagaacagaactcacactaaaaagttgggacaattagcttacttattcggtagctaatctgaacagtgtattgttgtagttcgtattcatgtaggtcgtcaaatttctctagatagggaatggttctaggtgatagttggggtgtgtttgatatatcattaataatgaattattgctgttaaggtcggaaggaaaaaatattcggctcgttaaaatgacatcaatagaagatgctccaatacactttaaaatatagagaagaggcttaatatgtcaaaatcgcattcaactaatcgaacggtcacctggctcctcaatatcgttaaactaattggtctattcgcactatatcaactagctatgattccaacgatgatgccagcaattcgacatgggttctcggccacggcaacactaattgccggagtggcaagtttagtcttgctcggatcactcatttggtggctggtaacgatttatcgtcgtcaagcgccaatcgtgaccagtttatcacgaccgacacgtccggtgttaacgatagtgggcctatttatcctggttgagttaggtaacgtgttggcgggacttatcgtgaaacaaacccctgaaaaccaagtgattttggataaggtatttactactagtccagtcattaatgttgtcatgatggcagtattggcaccgattgtcgaagaactgattttccgcgggctgatgtatcgttggttatttccgcgggtcacaaattgggtgagtttcacggttgcattagtttttgcgagtttagtatttgcccttgcccatacgttatcgtttagccctgcactactagcctacttaccgatcgccgtcgtgctgacttttacgtacgtgtggttcaacgatattcgctatagtatcgccttgcacattatcaataattcattggccatggttggcatgttgactttgctttcacgttaaaacaggttatcctattgacgtagcgattgacatgcgcgtattagtcgcgtgatgtgtaataattaaaacaggcaacgtccaaattttgggcgctgcttgttttattaatagcggtgtggttgatgtagtggtaatcattgtttggtcacttaataatattaaacagttcagttataccaagaatattattatgatacaattttcgatggaggtggcgagatgcgtacaattacaccaattgagaacagtcggcgacatgaagaattttgtccattggatacaactttgagtatcttgtcgggtaaatggaaatcaattattatctgtcgattaatggggagttcgcagcgcttttcgtccttattaaaaggcatgccgggctgtaccagtcgaatgttggcgatgcaactaaaggaattagttgcggatcagattgtgagtcaacaaacggtcgctaatcattcagtttatgagttaacgaacattggagtatcactagttccaatcgttgaagcaatggatcgatgggggaaggcttaccttgaaacgttacagttggcgtagtcgattggtcaacgcttagactaagtataggacgtcattattagccactatttttaacaatcataaaaattgctcgcaggaatcttcggagcagtttttttaatacgcattaaaagctgattggctcaaagctaatccgaatagtggctaagtgcatttgcaatcaatactgcgactaataaggccgtggccgctgcaatcgtcactgcgtaaaagccaattttagttaaaagcaggccgccagcggcagatcctaacgttaagccatagtataaaaaagcactattaaatgacatgatggttgaacgattagatggcacaatattaacgattgtcgcagttaatgcagtgacaccccagccttgagataaggcgagcacaaccagaataatcagcaatactgctaaatgttgtccccagatgcctaaggataagactaatgtagctgaaactaagccattaattgtaacgctctgttttttaccaagcaatgatataagtttaccggcaaagaaactcgcaacaaaattagcacttccataagtgataaagatgagaccagtttgcattgtgttgaaatgaaaggtcgcggttgcaaaaacacctaaaaaggtataaacgccatagaacccagtcatccaagttaatgtaatcagtagggcagcgatggcgtgaggagtgtggactaatgttttaaaacttgtaaaataaccgtcaggctgggcattctgactcggtaatgaaggtatggcaatggttaaaatcgataatgcaatcaaggttagcatggctgaaccccagaaagccatatgccaactactgagttgtgctagtaaagcaccgagtggtacaccggtagcaattgataatgaaagtgccgacataacgatgcccatgacttggttaagtcgttgaccattgaagtaagtaccgataaaagcccaaatgtttgggacaaataaagctgcaccgatgccagcgatggcacggtaaagatagaatgttagcaatgagtttgctaatccacagagtagtgttcctagtaagaagatgccacagccactgattagcaaaaaacgtttattaaagcggtcacctaatgggccgaataaaggtgcaccgatggcataacatagtgcgtaaacggtgactccgtatgccgcggtgttagtcggcacatgcagactagtagcgatagcggggagtagtgctgaaataataaatgcgtcagcaccagtcacaaaagccccacagaaaaggccaataataagccaattttcagtatgttggttatggatagtgatttgattgaaaataggactcactccttttgaattaggtacaactaggagtttaagggccttacaatagagaaacaagtgaataaaagtataccagcgactgtcgttaatcggatagaaatataccaccctagtttcgtttgtttttgaaaacagtggctattaatgataactaggtaatgtttgattagcaattgttgattatcaaaataactttatactgtaaaattggaacaatggtacttcctgatttgcgacttcttcaacgactaaaattcataatagtcctgattaaataaggctttccaatgttcaatcaggacataagggtgtaaacaccatctagcattatggcatcattggtttataatgatatttatattagcttattggagtgagcttatgaataagaaattattgtataccagtattaccactgcggcattattcgtggggacccaattgggtgttaacaatgcgcaggccgacacggcaactgataacagcgatacgacgaatcagacgagtgccacgcaggggagcgctcagacggcaactaacgaaaagttagcaacggtcaaaccgactagtcagcaacagtatcaagccaacgtgcagactgccaaggggaacgtagtcacggctcaaaatcaagtcaatacaacacaagctaaagtggcgactgcgcaggggcaagtgactaatcaaagtcaattagttgcgattggacagtcccagtatgatgctggtaaagcccgagttgaccgtgcacaacaaacactggatgctaacaatcaggtcctcgctgaggctgagaataaagtcgacgctgctaagtcgcaaacggcagcagctgaaacacaaattccagctgaccaacagcaaattgcggccaacaaagtcgctatcgccaaccagccagctaccgagaagaaagcacaaacggctaaggacgcggctgacacggccttgacgcaagctaaaactgaacaggccacggcccaatctgatgccgatgcagccagtgccgtcactgccgctaaacaggcgacggttgaccaagcatctgccgcccagcaaaaagcggccacccaagcaaatcaagctaaagtggccgtagcatcagcgcaagatgcggttaataaaaatacccaggcaatcaattctgccaagacagcgattcaaaatacgaccagtcaaattaatgcgaataatcaagctgtttccacagcgcaagccaaagtgaccgcagctcaagcagctttagcggcagcagaacggccaacgaccacgacagaatcgcaaaataagtatgacgctgccgaattcccacaatctcaattgactggggccgaaacagtcagcgtcgcctatccaagtaatggcaagtatgtgcctaatgcggataaaatcaatcagtatatgtttgaatatatcaatcagctacgggcgctgaatggtcaaccagcattgaaacagacgtcgacgttgcaaaataatgcgattgcgcgagcagctgcccaagtcgacggtggcttggatcatactggctcaagttatgcagaaaatttaacacaagtttatccgcaatggttcatgagcgatcaagaaacggcctataatgctgtgatgggttggtatgatgaatccaataacgttgagtccggttcctttggtcaccgcgtcaacctaatatactcgactggtgatgccggagtagccatcaacttggccaaacacgtggcggcatttgaagtcgataatgccgggatgacggaagcgcagcaagacaagtatgttgatttgttcgacaatgcccatacgaatgccgctactgggactaaggccttaccagctgtcacgttcaattacgtccagacgacccccgctgatccgaagaagattgcagcggctaacgcaacgttgattgctgcaacggctagtttgaatggtttacaaaataccgggaagacattagcaaccacgctggctaaccaaaatgccagtttacaagctttacaaaaccagacaagtggcttacaagcgactgttacgactaaacaggcccaagttcaagtcgctgcaactagtttgaaagcggctaatgttgctttgacgcaagctcaagggcaattagcaatggcgcaacagcaacaactatcgcccgttcgtaatttgaagacagcaatcgcgaagacggctgcggcgcaagtaactgccacgcaagccgctaaaaacttagccagtgccaagacattggtagccgatttgaccgctgaaaacgcccgattggcggccgaaatcgcggccctgcccgcgcggattgcaagcatgaaggcccaaattgctacggctgaacaacaaatcactgttgccaaggccatgctcgcgcaggggcaggctcaagtcgatacagcaaacgagcaacttgctgctggaaaagcgcaactggatcgtaaaaagaccgatttagcacaacttaagcaggtgctcggcgctgccagagttgatctcgccgttgcacaaggtgatttaacggctactaaagccttcttggcacgcgtcgaagctaacaaatttacaacgacgacggctgctgcggctgatagaattgctgaaacaacaaatgttgctcaatcgactggtgttaccgcaccacatgcgacagctactaaaaccgtagcgaatagcaatggtaccattaatgccacgagtactagcgtagatgtttcagatggcgatgcaacaactaagctgattgcgggagctaaacaacagccagttgccgcacatgccacggctttaccacaaacggatgaaaaacagtcatcgagtttgatggcagtgggattactagcggcagggttctcattgttgggattaacaaagttacgtaaacgcgattaacttctgagctcaaagatttttagaattattgatcatatgaaataataaaaacagttggactaggatagccgatggataccgggaatgatagataggcaatgaatgcttacctatggttgtcaatcagccgaaatccttggcctgactggtttttttagtggttagatattaagtttagtgaattaaacataaccggtattaacaataaaagacaactcatttttgatattttgtacacggcaaggctaatatttagtaatatattaagtaatacggccattgaagtttttttgattatttaaataaacgaattaaattaatggataattaacggaatgaaaaatgatccgttattaaatgcagagttgcaattgacagccatggtacataatgtgtccgtataatcccgtggatgattgggaaatccagggtggctaactgccgattgctttaaggggaattaaggttgtgaaaggaatagaggtatgggaaaaatcagtagcagaatggtctttgaaattatcacgattatcggtattgtcacttttgccgttatcagtctaacaccatcaacggcgaagcagcaaagtgtgcaattggatcacggacggatgagctacagcggagccgttttgaagcacaagtttgacggtcagggtacgttgcaggttaacaaacaggggcgctacgtgggtaattttaccaatggccggtttgaaggcccaggcgaattcatcgcaccgaacgggtggcgcttgcaaggcaacttcagcaagggtgcgttgaatggtgtggtcaaactgcgggtcggcaacaagacttatgccaaaaaaattacgggggacggtaagttagaaaatgcggattaaatggtttagtttagtacggataacgggactcgtgctggtattgacgtatcactttttccaaacccagtttactggtggctttattggggtggacatcttctttaccttctcagggtttttgattacgtcattaatggtggacgagtttgctcgttcggataactttaaactaatggctttctatggtcgccggttttatcgaattgtgccaccattatttattgcggtgttattggtgctaccgctaacttacttgattgatcacgattttgtgaccgacattggtaagcaggtcgcggcggctctcggatttacgactaattattttgaaattgcgacgggtggcagttatgaaaacaagtttattccgcacttatttgtccatacgtggtcattagcggttgaaatgcacttttatattttatggggcctgattgcgtggttggtcgctaaaatcagtcggcggttggcgagtggtcggcgcgcattgacccgttttcgttggggcttagggctgttgaccactgcctttgcgattgaaagctttgtcatgatgtactttggcgcggtcggcttaaaggacttttcaccagtctacttttcaagtctgacccactgttttccgttctttgtcggcgggcttatcggtgtcctgagcggcatcaaagctcaagggccaatctatcgttggaccacggcgcactgcaatccgatcattgcgggcgcggtgatgcttattagttttatcttgttagttgctttaggcgaccggatgaagttcgatgcgctacaaacgtatcagggtgggctgttactggctactgtactcgctggcatcatgatctatggcgcccggttgttgcatgatcacacgccgaacctcaaggaaccgcggtggatgacgttcttagcggatgtgagctatagcgtgtatctctatcactggccgttgtacgtgattttttcacacatgatggtcaactggttggcggcgctgctcacgacggtactgtcgattatcctatccgcgttgtcatactacgtgttagaaccagtgattgcgggcaaacgcgcccacgttttcggtcatacagtgacgtggcgacagttgcagttacccgttatcaccgcaggagtgttgttggcagttaataccggggtcgtagtcaaaaatgcgccgcaactttcgacactggaacagaatttatgggtgagcgggatttaccaagatattgataaaatcggaacgactcatgaagctgtgctcgcggccgtgacgcccaagaagaagcaggcaacgcctaaaggtgaccaagaaaaggcaccaggcgtttccattattggtgacagtgtcacgctggggacgcggagctacctgggcgatcacgtcgcgaacagcaatattgatgcggagggcgatcggacgatgaacctggcatataaagtcatgatgaaccagcagcgaagccatacgttacggcagtacgtggtgatttgtattgggaccaacgcgctggatgattacgaagaacaaaccatgaagatcattcatgacttggagccggggcacaagttgattctgatgacaccttataatgcccgggccgatgctgactggaattcatcaaagttggccgttttggaacggcgtctgccagctaagtataagttcattacggttgccgactggggcaagattgcggcgcaacatccagaagttttcaaagggacggatggcgtacatttcggtggcattcgggctggtgatattttatacgccaaggtaatcaatcaagcattgacggcagccaaacagactccggctaaaccagcctaatctagctaagtcagagcagttattagtagtcaatttaatagaaataatcagcttgcgatgtaacaattggcaggctgatttttttatgtttgtggttaaattgcgaagcggcgggattcgttgatggtaattgttcagattttaagtgacaattcgaccagtgtgcatattaattgtcccgaaattaaattatggttatcataagcatgtactcaaatataactgtaaggagtgattagaatgttaggatggctatggtcattaattgttggtggtgtcattggtgcgttagcaggtgcgattaccagccgtgacgttccaatggggatcattggcaatattattgccggtttagttggtgcctggattggtcaagcattgcttggaacttggggaccttcgttagctggtatggcattggtaccctcaatcttaggcgctattatcttagtattaatcgtttctgcaatcttcggcatgcgtaagaaacgttaggcggtgattagatgagccgcttagctaagtttacggtgacgttagtcggaattgtattggtgttattagcggtttttgaactgggtcagttgtacccgatcccgtggttgacgtcctggttagctgatctgacgattaactacccaatggtttggagtatcttattgatggtctttgccattattgccggaatcgttggtatcttattggtaattgtcggcttgtttcgaccagttaaagtcagcacgttgacgtatgatggcaaggttggccagttaacgattccgcaacgggctttggaacgtgatttgcagtaccgactcgttaatcagttgaatctgattgatcctgaggttcacttgaaattacggcgtcgtcgccgggtacgagtaaaaattgatgcgatggttaatactgacgcatcgttagaaaccacggcccaacaggcggcaaccttggcacaggactatttgaagaatcaattgggattgacggtcgaacaaccagtagtgcaagttaagccagcaaatcaccagcgtaagttaaccgtggtgtaaaggagggtcctgatgagtaacgcacagtatggttttctgattggactgcttttaggtatcgtctgggtattaaccagtttttcggcagtcttattagtcgcagttttagggctgatcggctgggcgattggacggtttgtccacgtcgatttggctgcagttagtcagaagttgagtgagtatttatctaaataatgggaggaattacaatggcacaaccagaacaacaattacagactcaattgacgtttgatgacggtgtgattgaaaaaatcgccggtctagcttcacgcaatgttgacggcgtgttatccctagaaggcggcatgttaagcaatttaacgaaccgctttcgtgatgaagctgacccgacgcagggggttgacgcccaagttggtaagaaacaagttgctttagatatgacgatgatcgttgaatatggtaaggacgtgcgacaaatcttcaatcaaatttgtcaacgtgttcagcaagatgttgaacggtatactggcttgaaggtcattgaaattaaggtacatgtcagtgacgtcatgagtaaacgtgattggcaagatcaggccactggcaaaccaaatacggatcaatcaacagataagcggcaagttgaatagcacggtcgtttagagtagtcattggtaagacgatttttgacaaaacaaggaggaattttgatggaagcaacagcgacatctttaaaaccagaagttgtttttgacgatacggtattggcaaagattgctagtaacacggcccaagaagttgaaggggtattgagcttacagggaaatctgattgatgatatttccaatcgctttacggataaggatcgcccgcagaccggcgtttcagtggataccgatgacgatgaccagacggttggaattgaattgacggccattctagcttatggtaagaatggtcaggagattctagcacgggtggcggataaggttgccaaggccgttaaatcaatgactggttatcaagtgactaagttaaaattagtcgttaaagacatgttaacgacagaagagtggcggcaacaaaatgacaagcaagaaaaagcaccagaaaagaaacacccagaaccaaaggatgacggcccacattaatggcagccgtaatggttaaaggtactcgcaaattaggcgggtaccttttttagtgatgagcgttacatgaagaaatatcctgagctaagttcgtaattgcgtttgaatgttcatgaagattgtccggaatgaccgtcacgcaactatcattattgttatgattcatgagatgagtgtacaataatatcaatgaggtgattaatatgaaaattggcatgcgggccaaccgaccgtttatcattacggatgaacagcatggacaaatagttttaaatgcgaagacagttttggaagcgctacatatgccagcagcggaccggaaacttggctcgcttgaaacgtttgcgccgcaagaattagcggcaccaatcacggccccgcaacagatttttgcggtggggatgaactaccgcgaccattcggcggagatccacattacgctgccgaaggttccaagtatttttacgaagtttagtagttcactggcaccagcgaatgtgaccgtggtgacgcatggccctgagaccgactgggaaaccgagctagtcgtgatgattggcaagggtgggcgcgatattgcgacggctgatgcaatggcgcacgtggccggagtgatggttggtgaagacttatctgatcgagccgttcagttcgagaatgataatccccagttttcaatgggtaaatcgtttgaaaattacgcaccagttgggccgtggttaacgaccgtcgatgaattagctaacttagacgatgaggtgatcacgaccaccgtcaatggtcagacgatgcagcaagcgccgttgagccaactgatcttcaaggtaccggatttggtgcactacttgtcgacggtctgtgagttacaaccaggtgatttgatttttaccgggacgcctagtgggaccggcgttggtcgcaatccccaagtctttttgcaagccggcgatcaactgtgcggtcagattacacatttagggacgttaaatatcacgattaagtaaatagccatagtcggtaagtgagatgggtgaagatttatattgtaacgcccagcacaatgccgactttttttggtaccataaaagtaattattgaatagggggataccggtacgggaccggtgaggagcaacatgaaaaaagtgtgggtcggattattattaggaagtttattattagcgggatgcacgacgtcgcccaagtcgtcagcgcccaagacgagtcaaaaagcaacgtcaaccaaggtagcggcaaagcaggccgctagccaaaaaaataccgctagcagtgattcttcatcacaggctgaggcaaccttgtggaatacgggcaagcaagcggctttatcaacgtttatggccgcttggcaacgcgagatgggccagacctatgtcgggacgtatgatgacaaggtcccggatcatttaggctttcgttttcccaatgctttgcttaatggtagcttagcaggccgaatcaagtggggctcgcagtcagtggatctcaagtggtccaaggacggcgaagaccgtagtgaatttcaagtggtggcggtcgcaacgggtggtaaggcggaagcacaatatccaaacacgtacttcttttgcctccatcatcggcgaccagtcgtctttgtgactcagacgaccaacggggacgagttgatcattcatgatacgcagaacagtgctttgcaagccggctttgctaagatcattacgggcagtcgaccgacgacgctgacagatagttcactgaacgtgaacatgagtcgtgatgcgaaggctaatcaatggcctcaaggttatcaggggacttggtattactataataagtacgatcacaagattaattcgatgacgcaaagtgataccgacgggttgaagctatcttatgtggcagctgagggacaaaaatggattcatattatgggggccgagcagactgctggggccggtaactttgaatacgtgcgttatcattattttgatggccgccaaattccagtattaatgaatgctagtggtgcgggggcctggttcgataataacgcctatccttcagcagccgcggcaaatcaaatgcgtgactggcaatatggggatgaatcaaagaccagtccggccgctgactcattagattaatcgagggtgtcatgatcggtagtgcgggcagggataaattaatcactgtgaaaatataatattaatataaaagccgggacaaatgcacgtaaattgccccggctttcattttgtaaagtttatgtatatattgaaaaagtcggaattgttttctgaaaataatgctatactatgacataagttaacggtgtcaagacatctaacggccggcgcattcatgtgaacggcacgacattttaaagctgattgtcgatcatgattgctgtcatttgggggaatggcgcgacgatgaagattaccgtcaacacaagtgtgtacgattggtcaaagagtaggaaatctaaagaaaaaaggtgtagacatgcagaaaaatatggaacacacgctcaaccttacgatgacgatgattttgaaaatcggcagcgcccggtcaatgattgcggctgccttagccgagattgcggcctatcgctacgaggcggcgcgtgaaaaattacgtcaggccgaaactgaattgctgacggcccagcggttacaggtacgccgactgatcgagaatgccaaggctcaacggtttgtgcactcgacactctttatgaatgcccagtcggcactagtcaacgtgatgggcgagttacagatgactgagaatctgattggcgcttttgaacgctgggagccagaagcggcttaatacgaacgtgaagctgacgagtgaaaggtcgtggtactggttcatgattagattttggaagatggtattcggtagcaacttagacggatagagatggggttaaaaaatgacagttacttttagtaatgaagatgatcacaagtttcataagcttactgaccaatgttttactgccaatcctaaattactgacaaaggcaagtatatcagtaccactaactacccgtaccattcagccacgccgttatttggtggtcaccaagatcaatcaggctaccttagcgacagctacgtggcaaccagtcaccggtgcaattgcgctacataagcatgaacgtttgatttatgatttgggagcgctatacgtcggccattttcaagttgccattgacgtggccggttcgccaatggacgcgccgttactgatgcggacaaggtttgccgaacagttgcaagagttaagtgtcgatgctagtcgcgtgaccagttggttgcccacagcctggattcaagacgacacgcgccacgttgaattattgccgaccacggtcgagttcgaacgccgctacagctgtcgctacatcatgttggagccggtgggtcagtcgctgaagtggcagccggtgttggcggatgcggagtttgaagaaattattgatgactttagacaagcggcgtaatatcgtcgtttacactaatgattatcgatatcgtacggtgcaaggaaccgtgtcatcattagtgatgggggttgtcgagaattagttgctaggcgcgtgacaaattcatgggcggcagaggacgcattccacccgcaattgtcgtataatgaatatattcttaaaaaacgaggagaataatatggcaaccacaactcatttttacgaaacatttcaaccagaacattacgatctttatatcaatattaaccgggcggataagctgatttcggggaagtcaacgattaccggggatgctaaggcgcaggaagtgctgattcatcagaatggtttgaccattgctggtgtccaagccgatggtgcggacgtgccctttactgtggatgatgcgattcaaggaattcgaattgaacttgccaaggccggtcaaacaactttgacgattacgtacagcgccaaattgacggacacgatgatgggtatctacccatcatattacgaagtcaacggtgtgaagaaagaactaatcgggacgcagtttgaaacgaccgcggcccggcaagcctttccgtgtgtcgatgaaccagaagctaaagcgacttttgatcttgccatcaagtacgatgaacatgatggtgaaacaatcttaagcaacatgcccgaaaatcatgaagcctatggggtgcattactttgaaaccacggtgcggatgtcgacttacttgattgcgtttgcctttggtgaattacaaggcaagcagacgaagaccaagagtggcgtgaccatcggtgttttcggtactaaggcccacaaggctaacgagctcgactttgctttggacattgctaagcgctcaatcgaattttatgaagatttttatcagacgccatatccattgccacactcatggcaattggccttaccagacttctcagctggtgcgatggaaaactggggcttagttacttatcgggaagcctacttactattagatcctgacaacacggccctcgaaacgaaacaacgggtcgccacggtgattgcccatgaacttgcccatcaatggttcggtgatttggttacgatgaagtggtgggatgacctctggttgaatgaaagtttcgccaacatgatggaatatgtggcgacggatgccttagaaccagactggcatatttgggaaactttccaaacgtccgaagcatcaatggcgcttcaacgggatgccacggatggggttcagtcagtccacgttcaggtagaagatccggccgaaatcgactcgatttttgacggggcgattgtctacgctaagggtgcccggatgttagtaatggcgcgggccttagttggtgatgatgccttacgagcaggcttgaagcagtactttatcaatcataaatatggtaatgccaagggtgatgacttgtggaacgccttagcggatgcttctgggatgcaagttggagacatcatgcattcatggctggaacaacctggctatccagtggtcacggcagcggttgttgacggtcagttgaccttgtcacaacaacagttcttcatcggtgaaggtgaagaagtcggtcgtcaatggcagattccgttgaatagcaactatgaggcggcaccagcgattatgaaggaccaagctgtgacggtcggcgattatgctaaattacgtgatgcgagtgggcaaccatttcgcttgaacgttgggaataactcccacttcatcgtcaagtatgaccaaacgttattggatgatattctagcgcacgttgatgacttaacggccattgaccagttacagttgttacaagacttacgcttattagctgaaggtcgtcaaatctcatacgcagccgttgtgccattattaagccggtttgcagccagccattcaacggtcgttaacgcagcgttgtaccaagttgcgggtaacttacgtaagtttgttacgccagattctgatgaagaaaagcatttacaaacgttatttgaccaattgagtgccgctcaggttaaacggttagggtggttgccacaagctggtgaatctaacgatgatcagttgacgcggccatacgtcttgagcgcggctttgtacgccaagaatagcgcggccgtattagctgcccatgagttattcgaaggtaatcgtgataagttagcgaccttaccagccgatgtgcgggtcttcattttacggaatgaagtcaagaactttggtagcaaggacttattcgatagtttattgacggcgtcacggcaaacagccgatgctagttacaaggctgacatttgtgacgcattgaccgcaactacggaccccgaattaatcaaacagttagttgtgaagtttgaagatgctgatacgattaagccacaagacttgcgggcctggttccgcggcgtcttggctaatccagctggtgaacaagcagcttgggattggattcgcgacgaatggtcatggttggaagccacggttggtggtgacatggaatttaccacttacatcaccgtcatttcccgggtcttccatacggctgaacgtttagcagaattcaaggcgttctttgaaccaaaaatcaatacgcccggtttaacgcgtgaaattaagatggatactaaggtaatcgccagtcgcgttgccttagttgaagatgaacgtgatgcggtgaatgcggcggtcgcggaagttgtaaaataagttaaatagtttagcgacaccctgttttggtaatttgtgaaaattactaaaacagggtgttgcttttcttttttattaggttataataattttattgaaacttataaatgtaatttttaaaaggtgggaattttacatgaatcttttaaccgttgttaagttatctgtgggtatgtcactttaccgtgttcatgagttaaagaacgaacacgttccaaaatactttatctacaatcaatctgatttggaatatgacttatcgggtgttgatacaagcaagcaagccaataaggtgataaggacagcagacaatgtaacggtagtacgggctggtgacgttgtgtttagtttaatatcggggaaagccgcagttgtaacgaataaacatgagaagtatctactaacacaaaactatattattttaagtacggacagttgtcttgaaagcaaatatctagtgtatctgttaaatgaaaatgctagtattaaacgccaattttggattggaatgcaaggctcgcgcgtcctgaaatatactttgaaacaattgcagaacttaaacttacctgtgcttcctacaaatgatcgacaaaaattaattggtgagatttactttaaacagcaacaattgaaactgttacgtgaaatgaatgttaagagaaaatatgaacttggtgtaattcaattaaaggaagtaaatgatgatgaaagaagatagttttgaaagtaatttaatccagtttattacgagtggacaggttttagctgaagaagtgaacgaggaacaaccactggactatgttgttaaaacgaaattatggaagtatgagaagtatataaaaacgactgatcaattatggaataacttcaagcaaatcttagaacaacataatcaggatacgttagataatccattgagcattatagagtttaaccaggtaaaaagaatcatttctaatttgcacacaccttatcaggctggtcagtttttatatggtttaaatggtgtctctcagattgagattgatttggatgatggaaagcatgtttttcttactgtatttgaccaaaaacaaataggtgcggggaatactgtgtatcaagttgttaatcaaattgaaagaccagcaattattgcagggaagaaagatcggcgatttgatacgacgctattaatcaacgggttaccaattattcaaattgaagaaaaacgtgatactcacgatgttgatgaagctttaaatcaaatgcatcaatatatagacgaagcgcagtatacagatattttttcaacgttgcagatcttaatagcaatgacgcccaataatattaaatatatggccaatacgaccacggataagtttaataaagcatttgcttttaactggcaacgtcgtaacaatagtgttgtatatgattggcgagaatttgcggattcaatgctatcaatcccaatggcgcatcaaatggccactaattatatgattctagatggaaccaagaataaacaaatgttaaaagtaatgcgcccatatcaagtttatgccacacaaaatgttatgaataggttaaaacagactgactttgacttaggaataaacaaggttggatatgtttggcatacgaccgggtccggtaaaacaatcactagctttaaaactgcatggctagcaagtaggctccctaacgttgataaagtagtatttgttgtggatcgcaaggcattgattcggcaaactaatgaaaattaccgagcatatgacccagatttgtcagatggagtatcgagcagtatatacgatacaaaaaacacaacagacctcagccgtaaactgaaaaataaaagtaatgggattatagttacttccacacaaaagctgcagcatttgattcaaagaaagtcattcaagtctcctaaaaaaaatattgtatttattgtggacgaggcacaccgatctactggtggagcttcatttggggagattcagagggcgtttaaacattcggcctggattggctatactggcacaccaatgtttgatgacacaactaatggattaagaacagaggatatctttggtcctgtattacacgaatacacaattaaagaagccatcgcagataaaaatgtattaggatttaaggttgactttgaaactactattgatgagcaaaaaatgaaaaccgagtatcttcctaatttttatcaacggcaatatccggaatggacaccggaaaaaattcaaaataaaattgataatttaacacaggctgatatggatgataaagttgagccaagtttttatgatgaaaatccggatcatgtacgtcttgttgttgaagatatttttaaaaattggcgtaatcgatcgaatgaaggaaggtataatgcgctgttaacaacgcatgtaggtggtgggaaagctagtgttccaatggctgttatgtattttaaagaatttcaacgtgttaatgaacttaacagtcaaaatggaaaactgacattaaaagttgctgtgacctttagtgaagatacgtctaattcagacagtatgttaagtacaaatcatgaattggaaaaagcgatgaaggcttataatgatgagtttaatacttcctttgatttaaatgatgtcagtggatacacccaagatgtagtttctcggttaaacaaaactgctgaggatcataaatatttagatattgttattgtagttgagcagttattaacaggatttgatgctccagaattgaatacgctctatgtagatagaacacttaaaggagcaaatttaattcaagcctattcacggagtaatcgaattgctgatatgcaagaaaagccatggggcaggatcgtgaattatcggtggccagcccaaaatgaaaaactgatgaataaggcattggcaatttatgcaaataaggattctgcaaatttatctaaagaagtgcaacatgaattgaatactgagaatggtattattgcggagccgtttgaaaaggtattcagacaagttcaagagaaggttaatgccttaagaaacttgaccgattcttttgagcaagttcctaattctgagcaagaccaggaaaaaatgatgagtttattaagagaatataattctggaatggcaaagttaaagcagtttgatcctgaacaagtagatggtaatcaaattgggtttgattacgataatcctgacgaattgattaagagcttgggcatgactactgatcaagagtctaaattgacaacggcactgaccaatgaattgaaagagaaagttgccaagaggaaaaatgtttcagttcagcaaatagagttaaaaatgacgcatgtaaaagatgttaaaattaactatgactatctaactgagttgattgaaaaattgttaaaccaagtacatgaaaaaaagaaagctgcagcgaaacacacacaagataaaattaattattttgccaaagaattgcaagaccgacattacgcggataagattgttaaagcagctaacgcaatcattgaaggcctttttcctccagtcgattctgatttcgagtatccagctaaagttcggaatagtgacttgatcattcaacaagcaaatgatgtcacttgggatcgcgtaattattgatttcaaatacaaatggggaatcagtgagataatttcaagtgaacaattacgtaatttgtttagtcgacatcatatagaacaactagacttggatgataccggacagttacgagatgttattgcaaaagcaagtgattcatacagagtattggcgcatgatatatcaatacagaagctttcgagaataaagtatcgaaatgcactgcgtgatgcaatttacgctttagctgatcagatggttgaaaatgaataattctgtattgttaatttttgattaatcaaagtaatatgttttacaaaggagataatagaatggcagaggaaactttacaatcaattaaaacgaaactatgggcaatggcaaatgaattacgtggaaatatggatgcttcagaatataagaattatattctagcatttatgttctatcgatatttgtcagagcaccaggaacaatacttggtgaaaaataaggtgttagatattcctgagggagattcagttaatacagcttatcgtgatgcggcaagtggtgatgatttgacggattatctagaagatatttcaacgacacttggatatgcaattgctccagaagatacttgggcatcattgactgaaaaaattaacaatagcgaagtcatccccagcgattatcagactatttttgaccattttaataaaaatgcaacgttaaatagtgatgcggcccaagattttcgtggcgtgtttaatgatattaatcttggcgactcacggttaggatcctcaactaatgagcgtgcgaaatcattgaatcgaattgtaggattggttgccgaagttgagtataagagcgaggatggaaaagatattctgggatcaatttatgaatatttaattagtcagtttgctgctaccgcaggaaaaaagggtggagaattctatacaccacacgaagtttcacagattttagcaaaaatcgtcacaaaggatgtaaaaacatctgacgagactttcacagtgtatgatcccacttgtggttcaggttcattattactaacagtgcaagatgaacttccaggtggtaataagccaggggcaattaagttttatggtcaggagttaaatacaacaacatataacttagcccgaatgaatttgatgatgcatggagtatcttttaataatatgacactttctaatgctgacacgttagaaagtgattggccagatggcatggatgcttcaggaactgatcatccacgttcatttgatgcggttgtggccaatccgccatactctgcgcattgggataacaatccaggaaaaattaaagatcctagatttggtgagtatggaaagcttgctccaaagactaaagctgattatgcatttgtgttgcacagtctatatcatttaaatagcactggtacaatggcgattgtcctacctcatggtgtactgttcagaggtggtgcggaagaggctatccgaaaaacattgattaataaaaattatttagatgcagtaattggattgccagctaatctgttttttggggtgtctattcctacgataattttggtgtttaagaagaataaacaaactaaagacatcttattcattgaggctagcaaagagttttctaaaggaaaaaatcaaaatacattgactgccgaaaatatagataaaatcatggatacttacaaagaacgacaagatattgagaggtatgcccatgtagctggcgttgatgaagtcaaaaaaaatgagtataatctgaacattccacgctatgtagatactttcgaagaagaacagccagttgatgttgataaattagtagctgacattagtgcaaccgataaaaagattagctcattacaggacgaaatcaacgcaataatggaagaattgacagcaagcgaccctgtcgctcaacagcagctttctaagattaagaggatgttacgatgaaagtgagaacattgatacccaatattaggttcagaggtttttcggacccttgggagcagcgtaagttttttgataacataaagcaggttttggattatcgtgggaaaacacctaaaaagttaaatatgaaatggaatgaggaacctaaagggtatttagctttatcagcaatcaatgtaaaagcaggatatattgataagcatattgaaacatattatgcgagtgaaaaactatacaagaaatggatggggaaagatagtttaagtgctggagatattttatttacgactgaagctcctatgggtaatgtagctctggttccagataagggaaagtatattttaagtcagaggacaattgcttttaagcttgataaagctaagcttgataatttattctggttggagtttttagaaagcacaatttttaaaagtaaggcagtagctatttcatctggaggaacggcacaaggagttagtcagaagtctctacgtcaagtcattgttattattcctagtgatgtaaatgagcaaaagaggattggacaagtattagttactgttgacaaccttatcgctgccaatgaggataaagtgcaacaacttaaaacactcaaaaagttgatgatgtaaaaaatcttttctcaggagtggcgcttcaagggattcactgacccttgggagcagcgtaagcttgaaagtgttgttatcgtttatgataaaggtagagttcctgtgacttcaactgaaagaatttcaggagacactccatattatggggcaaatgggattcaagattatgttgatggttacacacatgacggagaatttactttaattgcggaagacggagccaacgatactcgcaattacccaattaagtttgtaagtgggaaaatttgggtgaataatcatgctcatgttttggcgggaaagcaaaatatactaaacacaagatttcttagctttagtctacagcaaataaatattgaaccatttctttctgggtctggtcgggcaaaattaaatgcgagtgaaatgaaaaaattgctaattgcagtccctaacatttatgagcagataaaagtagaaaattttcttggagagatggcgcaccttatcgctgccaatgaagataaactaaatcaacttaaaaggttgaagaaatatttaatgcaaaatctgtttgtttaaatttatggattttttacgggctatccccgctgaacagcgatagtattaatttatttgtaagtgtcaattttagccaaatgaataattattcatgtataaatgagttagcagccgcacaagtggttgttaactcattttttggaggtttattatggcacagcatgttaagttccatcagtatttttttcagtggatgcaactctataaattagatgcggtccgtccagtgacttatcgcaaatatgaaatgtcacatcgtcaattggtaatgttagcgccagatttaaagatgagtgatttatcaaggctgacatatcagcaattgctcaatgattatgcggaaacccatgaacggcaaacgacaatggattttcatcgtcatttaaaaggctcgcttattgatgcgttggaagaagggtttatcgatcgcgatccaacacgaaaagcaattatcaaaggaattaagcatcgtcaacataaaacgaagtatctacatcagtatgagttgcaggcattgttaaatgaattaaacttgaacaacgaagtcaattgggactacttcatcttgctgattgctaagactggaattcgttttgcagaagccttaggtgttactcctgctgatttcgattttgctcaccaaacactttcaattagtaaaacttgggattataaatctgccaagagtgactttgcaccgaccaaaaataattcatcagtccgaaaagtaccgctggattggcagactgtgattcaattttcccagttgactaaaaagctgcccgatgatcaggcaatctttgttcaagcaaaagtttataatgatacggttaatcattatttggagcgtctatgcaagcacgcatctattcctgtgatttcagtccatggtttgcgacatacgcatgcttcattattattgtatgcgggtgttagtattgcttcggtagctcgacggttaggccattctaatatgacgactacacagcaaacttatttacacattattcaagaattagaaaaccaggataacgacaaggtcatgaaacatttagcaagcctaatatagacgataggatttacattaataagtgcagattaaaacgtcctcgaatgttgaggacgttttttaaattatactcattggcagcgataaggctgtctattttaaatatggttaatcctactttggactgttcgtcaataatcggaactagcaaagaagcattggctaattttgaactactaatcgcaggatagctagttccagtggataaggcgagtattcgattaacaaacggcgtagtctgtaatgtataaaagagatatcttatgtcttgtttggctctaatttgtgtataccctgttgaaaaaacaacgttatttttgtttgtcaaaaaaagcaagttatttttttgatacggtcttacattttgaaaaaaaatatcgcctttttttgctaatcgttgcgctctagatggcgcattatcttttgtcactgctctatactgtgtaactctattttgacttactgattccaaatccacataaagaaaatgcggagaaacaactgacttcggattaatggtcgcaatctgataaagcttacgctgctcccaagttttcaggcttatcggtcatatattaggaactggtacttgggagcagcgtaagctccaacagattgcgaaagtgtttgatggaacacatcaaacaccagaatatgtttccaatggagtcccatttgtttcggtggaaaatataaaaacgttgaagactaataagtatatttccaacaacgcatttcaaaataattttaaaatatttcctcaaaaaggagatatttttatgactagaattggcaatataggatcagttaatattgtagaaaacaataaagatttagcgtactatgtttcgcttgctctgattagacctgagcatataagaactcagtacttggctcagtatatttcatcccaaaatgggcaaaggcaattatggcgtcgaactttgcatgtggcgtttccgaaaaaaatcaataaaaatgaaatcagtaaaatcaacattttttatccagataatgtggagcaagaaaaaattggttcgttaattatcaaattagatcaccttatcgctgccaatgagcaagtcccaaaattagtcattaaaatagtaaagaattctctagctaattcattgcattaaaactaatggttatgattatatataggacacttggcgtaagtaaaatgagataaaataatcatcttaagcacagtttgaaagttggcttcaagcacccggagagtccgaattaataattatgccacattttgtttaatatcagtataataatcaagaccaaaaataattatgttgatttacggttccatctgatttgttttaatacaaccgtagaagtacctttgaaaagcaccaattcgcaagccaagcaaaaatgccaagttgactagctcataatctggttcaccataccaaatgaaataatgtttccctaactacctaatcaaccgcaataacacgcacaccacaataatccacgtctttctgatcgccaaactgtcgggcgtgacgcaggcgatgcaatcgtaagatgcggcatacttattcaaagttgccaaaactcgggtcttcatttcagctgccgattcgtaagggaggggactagcgatggtgcgtttgccggcgtgttggcgatagagcttgtaggccgtggccgcttgttcatcgatatcagtccgactacccgtgttatcgggcagccactcgtgtaatccaaggtcgacctttagtggaatatcattaaaacgcacgatttccagtgccgtttgtaaggcacgcgtgtagggtgacgacagaattaattggacttgtgcaaataacggctgctgggcgcattgttgtgccagcataataccacggtcggttaagccgccgagttcacggccgaaaccagttaatccagctgtagtgacctgttggtaagttggttcggagtgacgaatgagatagactttcatcgattaggacttccttcattggaattataatgattaatttcattataggcacctttgatcagaaaaaacgacacttcgatttttcgaagtgtcgttttcgttagacctaatgacgttatgattgccgatgtttaccatagaacccgaacgtgacgacggataataacagtcctaggatgaccgctaatttgccagtctgttcgtcggtttgtggtaactgggctgagtgttcagtgacgggactcgttgttttgaccaaacttgcctgggcagccgcgggtttaagcgttggtttcacggtcgctactggttttacagctaccgctggttgagtcggcttaatgcggtccggctgcgttacggtcgttcctggttcgttaggcgtctcgggtgtggttggctcaaccggtttaatcggcttagtcggttgttccggttcttcgggatcaataatatcgtcggtaccagtcgtgtcagttgcttggtagacgtacgtgacgtccacgttatcagcagtgaagagacccatggcattttccggctgaccaacgagttcatgatcagtgaatgtcaggggcacggtttgataagtggttcccgttttgccgctcagcacggttggttcgctcagtttaatgccgtccttggtcacgtaatgcaccgtaacggttccttgggtatctggaatcgtgggggtgttttcagtgtaaacgtaggtcacagtcttcgcggtagttccgaacgtcccactgacgtcaccttgcacagcattgaaggtgtaaccatcgatagcaagctgttcggtcgagtagttgtcacccaaataaccgctgtgaacaacgtcaggatggatagacttaccatgctcatccagatacttggcagtgaccggctgtccagctgtccgctcgtaaatgtaaacgacgcgttgtggctgcaaagtataggtaccagtcgtgttaccctgtgtcgattttaccgtatagccgttaatgttcagcggtgacgtttcatagggctgtcctaattgaccttgaccgcttaatacgctatcggcggctaactgctggccgttttcgtctaaatactgaaccgtgatatcgcccgcatcctcgcgagtgtagacgtagatgacggtttgcgcttggtcgctgaattgcccagtagcgttcgctggcgtttgaattaagcgatagttttcaatcgtcttggcgttcgtctggtaggggcgacctagctgaccgttaccggttaggatgtcgtcgggagctaaagtcgtgccgttagcgtcctgatacttcgccgtgatatggccagcattcgagcgcgcatactggtaaataacagtttgcgtgtcggttgaaaaggtcccggtggcgttcgcgggtgtgacgactaggtgaaagttaggaattgaaatggctgtcgtttgataggctgctcctagctgttctttaccgtctaaaagcttgtcgggtgctagtgggttaccagcactatcttgatacttaacaacgatctggccagcatcgcggcgcacatagacgtaaatgaccgtctgttcctggtctgtgaaagtgcccgtggcgtttgtcggcgttgtcgtcagggtgtaattttcaatatccaacggttcagtcgtataggcttggccgagtgattgggagccggaaattgtcttatcgggctttaattgttttccctgcttatcttgatatttcaccgtaatgttaccggcgtctaagcggacatagacaaacgtgatgctttgcggatcagtcgtgaaaacgccagccgcattgccgatagtttgctgtaatttaaaatggtcaaaggttggcgcatctaaattgtaggcgttaccgagattgtgttttccaggtagaatttgcggttcgtagactaagttgccgttagcatcgaccatgtgaatcgtaatgtcgccggcgtccttacgagtatagtaataagtgacggtctgggcatccgctgtgaagacaccactggcattgccgacaatgttcgtaaagtcataatttggtagctcgtcatcaatgcgctgagtcgtgtaaggctgaccgacgattccgtttaaggtgaggtcagcggtgactaaggattcaccggtaagcgcgtcgacgtatttgaccgtgatgggcgcagcagtggcagctaagacatacgggcggacgacgacaaagttgttaccgtcagaagcggcggtcatgaaataataatcgtccatgggaataaccgtggtaccgttaaaggtcggacctgttagtccgggttgctggggcttcatattcgtgtagtagatatgaccgttgctgtcgtaattaccaccgcccgcaccgttaaagtaccagcgaacgtagagctgaccgtttttgtagaaaacagtttcaccgacgccattattgggcttcagttgaaccttagagccatccggtaaatagcaatcaatcgccagcgtcgcaatattattatctgcactaatataggcgggtggtagggtgataaattggttactgaatgtgcctttcagatttttaaatcctttaagtggcgaaaaatctgaaatgtggttataggcggcatcgacctccgttaaattctttaagtttgcgagcggtgaaatgtccgtgatccggttttgctgaatattgaccacttggagtttttgtaagttggctaatggtgaaatatcagtgacatcactatagtaactgccagacggtgcgttcaagttgttgttgagccagactgtcgtaaggttagtggcatattgcagtccttctaatgagtaggaagtcttgccgtcgatataagtgtccttgccatagtaggtggtcagtagtagcatatctgccttagtgatgtctgcagctgagttccaggtacgatctgggttctgtttgcgcagttgactgagtacctcttgttgcaataacgtgttcggcatccaatcgttaatattttctgacgcggtgcggctaatggcacggacgactggttggttagttttcaaaaccagcttttcctggtttacattggtaacaattttatcatcggttgacgctgagctagtcgctgactgagtattcacctcggtggtagtggagttggacggcgcaggtgcggcttgctggcttggttgcttggaagcttgattatcggttgtcgttgctttagcttgactatcagtcgctgattcagtgtttgattcggtagttggttcagtagttgatgcggaggttgtttgagctggtgcggtttgagttgggtgcttaatatctgtggtcggtgttgattctgacgtggtagttgcttgagattgtgatgctggatttgctgattgttgttgtgggttggtgttcactgacgacgagtgctcagagggacttccggttgatgtggtgggtgacgtggctgcgactgctgactggtcggattttatcgtggatactgatgtagaagtatccgctttcaaattgacctgagtagcgttaacttgagtattcgtattcaactgactgttggtcggttcgttggttgtggtcgtgactgtatcgtcggcagccgccgcctgactggcaatcgttaacgttgtcagtatcatggcggttgcgctcgtgattacccatcgcgattggtgacgtttattctgattattaacattgtttggtttcaaagatccccactccttcaaaatacttatataatgtcgttgacaatttaagggtaacattgtcattgccgttagtctaataaatgataatttaattattgggagctaattgtatctgtcaatgtcagctggctgcataatagttgacgtaagcataagattgattataatttaaatggtaataattactatttatcaggaggcacccatgatggaaaaacaagatttagcaagtgcgcgcaggcgtctacgggggaccaacttaaaatcgcggaaacgcgcattgaagattttacatgatgcccgacgtaacgccagtaaagccaaatagtatcagcgaacgttagccaatttggctaacgttttttgttagctgtgcggtatgattaagatacaggaatgagtggaggacatgtggatggaaacaactttggtgattattcgggggaattctgggagtggcaagacgacgctagcgcaggcgttgcaacgacgcgtgggccatcatacgttgctagtgtcccaagatgtcgttcgtcgcgacatgctgatgagtcatgattacccgggaaatatttcaattggtctgattgaacaaattgcgtgctatgggctgggacgtgtgcctgtagtcattgtggaaggcatcttagcacgtgatcggtatggaaaaatgttggcgcggcttagtcaatcgtttccacgcgtccttacttattattttgaagtgagctttgccacgaccttggcgcgccatcaaaatcgtcatcgtgattttggtgtggaagacatgcgtcggtggtggtttccacatgatacgttgggcgttgctaacgaagtcttaattggcgagcaacaagatttaacaacggaagttcaacaaattatgactgccatgtatgattgtgactaaacaaccatgagttgattggtttgatcgtggttgaggattaagctgaaatcataaagggggcgagccaatgttactcgcagcattattgaaaacgcgtcgttgtcagtatggattgacacaggcgcaattagcgtccaagttatttgttacgactcaggcggtgtctaagtgggaacgcggaaaggcgattccgtcaatcgataatttactggcactgtcggatctgtataatctatccttggatgaattagttcgtggtagtgctttctttccaaagccatatgttgttggtcggcgactaagctttgggcgacttctgggtctcggattattttggctatttgtttgtctattatttactggttttggttatcagccgtggtggctctttttatcactttatattgttggattgattgtggtcgttccagtgggaatcaatagttactgggtgattcagcctgctaccattgagttgcatacgtatgctgcatcgacattgacgaagtttcgccaaattgtgttcaattgtccacggtgccaactaatccactatacagatctgcagcgagttaccatcagttatcggtgtcgcaaacgactttcaccatttgatttcaatccggattattttcaattgattttaaagactaatgcccaaacttatcagctggaatgtgcgttgaaggccagcgactatttaccgcaatttgtcagttatttgcaacgacaaggtgtgacggttgatgatcctcaacaagttgtggaattgttagtttcaggaaagtcgttgtatcaacattttcataccgagacttgatcttgagtggttgcaaccaaccgttgcggtagcgcttaagtgtgttgcaatgaattggtgcacccaatagtctagtattttaatagaggagcgggtaggatgaaaattgtgattggtactaaaataaaagagcaacgacaacagcatgaatggtcccagcagacggtggcggagcggttacacgtctcacggcaaactatttccaagtgggagttagggaaaagttatccagatttagagttgttggtagcactgagcaaactatttgctgtctcgacggatgagttattaggtttgagcagaagacctgttcagcgaccatggtggcagttgttattgcgtaaaaggagtcgaacagatatgacggtgaaatggtacagcggggggcaggatcgggcacgtgttgctgtgggcataattagtgatttagttgctaatctaaataccacgaatgagcaaccgttacgacagctgctggcaacttattatcaggaactattggaacaacgaactggttcagtactgggagtattcgacagaatgaacttagacatctccaaatgtctgcggcagcaacaaatcaaactatcaccagaaaatgagcaactaatgcaacagctggtggggttgaacatgatttactaccggtgatttattttgaaagtaaaacgcaaactgtcgatcatctagcttaatagatgctgacagtttgcgttttatgttaaaaatcaatcgcaggattaaaggtttgacaagcttgttcgactagataagcaatcggtttagctagcacgtgacttggtaagtaggcaatactaaaataaaggctgagctcgcttgttggtaatttgaacgcattgatagggtacttggctggttcagtggctagtcttgccaacattgcagtggctagaacaatgctaccaagtccttgaagtgtcaagcttagtgcaaagcgagagttatcgacttcaatgagtggaatcgtttgaatgcctttatcggcaaagtaatggtcaaccagttcttgaaagcgagcttcaccgactgcacggatgacaggctcaccagtcattcctgtaagaatggtgggggtgaacggtcgccaaaattgattggactgatatattccggctgtttttggaatgactaaagacaaagaaattgtctgcaaagggatggttttgacgttagtttgatgaattgttttgccaataaaaaagtctagctgatgactagctagcaacgtttctgcttttgatgttgtgatttctagtattttagtgcgaatgttcggaaaacgttgataaaaagcaggtagtgtttgactaaaccaagcattagccattggtggtgtaatcccaatcgtcatactttgatacttattttgactgatttctttaagttcagtgttcattcgctgatggagacgggcgtcactttgcaaataagtcagtaatctttctccagcataagttaattcaagtggatgatggccgcggtcgattaagggggtcccaaaatgagtttccgcacttttaattgtgcggctaatgtacggctgactgatgaataaactttgtgcagctttcgtcatactattgtgctgttgaatagcttctaaaaatactaacaatttattttccatgaaatcgccacctttaatgcttaatcttattaaaatcaagtataacccattactcatttgtaataacagataatcagattgttatttctataaaaatgaaagcggttatataatacagatgtagttaaaaaatgattctgtttgtgatttaaatatcaatttcaattgtgctttagaatacgttaaatggattttgaaagggtggtcagcatgctccaaaaaatgaatcaggttaaatgggattatcaatatgatacggtagttattggctttggtggtgccggggcgacagcagcgcggtttgcggcggatgcacatgcgaaggtattgctcacggatgcagcgccgaatggtcatgaaggaggcaatacccgttattctgcccaactcttaggaacggtagatagtttcgatgagggtaaaaaatattatcaaaacttaacggcacccatgcaattagacgatagtatggttgatactttcgtagcgggcatggcgaatatgcgcgactatgttcaaaagtatctcaatgttgaaccggtgagtgtcaaaaatgattttacagctgctgattctccaatttcattagacagtgcagttcatgagtttcctgaatttgatggagtccaatcctatgactttacaactgtccatcatggcatttttgatgcagctttgtggaaaattcttcgacaaaaagtgttagatcggcaccaacagattgatgtctggcttagtgctccggcacaacatctgattcaagatcccactacgaatacaattatcggtgtccaaatcgaacgtcagcatcgtttagttaatgttcgagctaccaatggcgtagtcctagcttgtggtggttttgaaaataatcaacaagccatccaggactaccttggtgctgagcacttggcaccattaggcacgctgtttaataagggtgctggtattaagatggcccaagaagttggcgcggacttttggcacatgcaaaattatgaatcactcggatttttacatggtctttcgattgccgtaccacaaggtgaacgtggtcgcttgattttaggctggccggaagtgaaccatggtagcgttattacggtggctgatgacggtagtcggtattttgatgagagtgaagccaaccggcacggtcacatttatgatcatggaatgtggcgagtaccgcggacaaatgtccatccatacttggtttttgatgaaactcagtatcaacagatgttagcaagtcaatatacgccgattaataatctcaccgatttagttgtgaaggccactactctaaacgacttagcacgagttatggaagttgatggtacggtacttaccaagaccgttcatgatttcaattattttgtcgagtctggtactgactacgcgtttaatcggcaggttgatacgatgcgggcatttgatgatggaccatattatgcgcttaagttaacaaacaacgtacttaatacccaagggggaccacgtcgtaatgaccgggcagaaattttagatgcaaatcagcaacctattccgcacttgtatggtgcaggtgagttgggcggtatttgtgcaaatcagtatcaaggtggcggtaatttagctgaatgcctgatttttggaaaaatcgctggtgaaaatgcagctaaacctaaggaagaaacgatacaattagtcgatgaaaaagcagtggctaagccggatgcgaatactagtgcttcggtgcatcagactggtgccaatgatttgctagctgaagcatcaccggacatcacagttggtgaacaccaatacttagggcgctcagatgatggcattggtgggcaagttgtggttcgtatcacgtatgttgaccaacaattaactcatgttgaagtagttgaacaacatgagactggtgaagttggtggtcaggcagttgccgaattgccggcaaaaatggtggctgctaacacttatgatgtggatgcagtttccggcgcttctgtatcgagccgtgccatcaaggccgcagtcaaggacgcgctatcccaggccaaacagaccgtgtcaaatgattaaccactgatcgcacaatccacgaatcacctagtgcttttagtatcttttagtgcgtaataccggtaaactagaattaacaaattcaatcaatggaggccgctcatgcgtattacaaaaacgagtttactcctcagcagtttatcattggtactcaacacgttgtcattgattatagcaattcgcaagtatcgattacaaaatcactaatcattagaaattcaaaaacaccgctgtgactaacgaacgcattagtcgtagcggtgtttttggttttattaagcttcataatccgtcaaatcagccaagaagcgttgaatcaccgcaagttctgctggtgagtagtgttcatgaaggagcgtgattgcttgatgattgcgggttgcatgcatcttatcatgatagcgggccagcttacgaccactcggcgttaagcggtagaagatctttttgtgatcatcgggttgctggaatgagccaattaagccctgcgttacgagtcgtttggctgcccgggtcacaccacctcgagtgacgccgaggttagtggctaagtcgatgcccgtttgtggaccggcctctagttcagataataaatgtaggccaacgatggaaatatccggcaacaggcggcgtagattggcttcggtgatatgctgctgtaaccatttctgttcaccagtagtggaagcacgcttggttcgaatcgttttgagctgcgttagaattgtctgttccgtggatattgacatcgattgatcccccttagatagttgtgcgtcatggcgactggttctcgtggtggttagcgcgcaattatcaattaatcattagcttttattactattattataccggttttaaaattcaccggcgagtttttctgctgctacctgtgcggcagtgatggcctgttctcgctgttctggaaattggtccaatccttcaatgaagatggttcggtaatcctgaatcccatacagttgcatcatgccacggaggtaggggtcgcctgcttcaacctggttgtgctgatcaggttggtgatagtagccacccgcagcctgaatgtgtaagacgtgtttgtcgggtaataagccgaccgggccgttgaccgtgtacttaaaagttttacgggcgactgcggttaagtctaagtattgtttgagttcggctggaagaaagtgattgtacattggattaacgaagacgatcttgtcggctgctagaaattcagctagccaggcggcgtgacggctaagtagttcagcttccactgacgttagttcttcaccgtatttttgtttacgccaagcttcgaaggttgtgtcgttcaaagcgggaacgccgtcctgataaagatcgcgtgtcgtaatctcatcgttcggatgggtttgctgatacgcagttttaaaactcgctgcaacggtcagtgaggcactggggacggtcgtgtgtggatgagcattaatcattaataattttgtcattttaaacagctccttaattttgttgacaagcaacattttatcttgaatattgttgcttgtcaacaaataagataaaaaattccccacacattcgaaaatgcgtggggaatttaaaggatgcacgattaattttgattaaccaatgctactagcactaggttggagcgactttacgggtaaatacggtgcaacatacgtggaaacggaatggtttcgcgaacgtgatcttgcaaagtgatccaagccagaaaacgttccagacccataccgaaaccggagtgcggcaccgaaccatatttgcgtaaatcgagataccactcgtaatcctgcaagtcttgaccgctggctagtaaccgttccttcaagtagtcataatccgttgagcgttcggaaccgccgatgatttcgccgtaaccttcaggtgctaacaggtcagctgcaatgacgacatcatcgcgcgtcgggtgtgcctgcatgtaaaaggccttgattgctttgggatagtttaagacaaagactggttggtcaaagtgttctgccaaaaatgtctcttccggtgagccaaagtcgacaccccagtcgacgtcaaagccgttcgcttggagtagtgtaatagcatcgtcgtacgaaactcgcggaaatgggagcttggtgtacttttgcaacgtcgcaacatcgcggtccaaaacggccagttcgtgggggcaatggtcaatcacggcttgaacgaggtaggccaccaattgttcttggacttccagactttcatcttgatgtatccaggccatttcaggttcaagttgccagaattctgttaagtggcgacgagtcttggatttttcggcccgaaaagttggtccaaacgtgaagattttgccgaacgccattgcgccagcttcaccgtataactggccggattgtgataaataggcgtcctgaccaaagtaatcagttttgaataattcagtcgtcccttcaggagcggaaccggtcaaaatcggcgcgtcaatcttaataaaaccgcggtcattgaagaactcataaacggctcgaatgacctcgttgcgaatccgcataattgcgttgggacgcgatgaccgtagccaaagatggcgatgatccaacaggaaatcaataccatggtccttgggcgtgatcgggtagtcgtgactagtcccaaccacttcaaattgtgagatggcaagctcgtagccaaagggggaacgggtatctgcatgaatcgtgccggtgacccagaggctagtttcttgcgcgaggtcggtcagttgtgcaaaagctgtttcaccgagctcgtttttgagagctaccccttgaaaagttgcagtgccatcgcgtaattgaagaaaggcaattttgccgctagaacgcttattactgatccacaccccaattttaacttgttcattgacatggtcagcggcgttgataatactaatggtttccatgatattgatcactccttcttgttggattttaaatcagattaaagtaaatgaatgttatgttcggcacattggtcgatcatggcttgtggccacaaggcagcttgtacttcaccgacatgggctttgccaagtaataacatgcagagccgtgattgaccaatcccgccaccgatcgtgtaagggacgtccgcgttcaagatcatttggtggtatggcaagctaagccggtcttcggcgtccacgtctttaagttgtttcttcattgattcagcatcgacccggattcccatacttgagatttcgatagcttggtctaatggttcataccagaagaggatatcgccgttcaatttccagtcatcatagtcgggggcgcggccatcgtgacgttcgccggaatcaagcttccagccaatttgcattaagaagacacagccgagtttcttgcaaatggcgttttcgcgttcgcgcggcgtcatgtcagggtacatgtcttcgagctcttgtgtggttaagaagtgaatttcgtctggtaagtggtgaacggcttgtgggaacttgtaccaaacttcgtgttccatgtgcttgatcactttaaatatttgacgtaccgtggctttcaaagtttcaacggttcgttcttccttactgatcactttttcccaatcccattgatcaacgtaggcggagtggtaattgtctaaatcttcatccttacgaatagcgttcatgttcgtgtagagaccttcatgcatatcaaaaccgtagcgctttaaagcgacccgtttccacttagcaagtgagtgaacgatttcgatttgttcatcacccatgtcttgcatagtgaaggagacaggtttttcgacaccgtttaagttatcgttcagaccagttttcttttcaacgaacatcggtgctgaaagccgagataagtttagttgcttcccaaattcatcttggaacgtttcacgaatgtaacgaatggcctgttgggtttctttaacggataatttaggatcgtaatcctttggaataattaaatgcatatgcgtggtctcctttaaaataagttcagattttagttacaggataaaagaaaagagccttccatcccttgaattatcaagggacgaaagactctttcgcggtaccacccaagttgtttaccttacagtaaaccagctttaaaatagtgtacaaacatacaccaccgatggtaacgtaccggttaacggctaatcctactttaacgaggttatttcagttagcaactaagaaagtgtttttcggattagtcaagttctggtcgggtttccactcactcccgattcactggcaggttgactaatcgtactcctctttcctccgttttttatcttgtgacatttatattagcacgattctggtatttgtaaaccactaaattaaaaataaattagtttagtctcatgaattcaccataaaaatcttagctaaaaccgcaagctaccgggcttaattaatcgttcaaattataacgtaatttcattttttcagaaccggcaatgaccatatcgccgagtaatttagtttgtaacttcatcgcggtatcggccaattgttggttagccgtttcaagataggccgtgacgtcttggtggttagccaagtcagcgtcggtatcattctcgattttacggtaagcactcatggcttcgagttcgtaactattccgcatatccacgtaaaagtcgtagtcggtgtcacccaaaagggcggttgtacagcttaaccagtacatgtggttgagattaaaggtgccgtccgcatctttgtagctagctggcgtgtcattgacatttgcatagaatggtacgaccgtgttgaaggtattggcaccaaaggctaaccagtgaataccggcaacagcagcggggacgttgttgcgaatctgtaagatgtgcacatcgtggttacggttgatcccgattggccggaaaagggttttgtcagcttcagagccactcccgtaaacatcgtatttcgtgttttcaaagtgagaactcaaaacgaacttgacgtcttcgatagaaatcttacggttagcatggcagatgaatggtaagtcttgttccattggatcttgcacaacgtccggcgtgaagtatttctgaccgaaccaagcccgggggttgttgtaaaccgtatctttgattgaagcacttccaaagatgtgccgcaagttgacacggtcaaagtcaggattcaagtggtaatcttcaattaattgttcaaggtcagctgaagctaaggtatcatcagcgttaaaatcgaaatcgtcaatattcatgcggttcggagcaaccacgtaagcatcgtcaggaatacgtttagcagcccagtggtgaccaccaatggtttctaaccaccagatttcgtcttgatcagaaaaagcgataccgtttggttcgtaagtcccgtattgttcaagcagggcacctagacgagtaacgccttccttggcgctgtgaatgtatggtaatactagggtgcaaaggtcttcttcaccaattccgccggcaacgaagggatcgattcccaagatacgcgagttcgtggtgatggtttcggttgcggacatggcgatgttctcactgttaatccctgctgctggccaggtcccattggtcaagattgagttgggaattgaagtataccgtaagggattgtcaggtaagtcgacttcgaccttactaatgacggactgatagtgccggggttgatctgcgggattgaccacaactaatcgttcggggtctagggcttcgtgaccatcatcgtttcgtgaaataatggtcgagccatcgattgaggcttttttaccgacgagaatcgtggtacatgaacctttaatacgtttttccatgatattaaaacactccttttaagctattaatatcattatacgctttctgagcgggtcgggatagaacgggcttttttgagaatataattaatcccgctaatactaaaaccggtgaccgccgcaatttcacggtaagtcttgccacgtgcccgtaactggtgaacttgcgcgtggctggcatgttgtggtgtggggctaggcgtctggattgacggaaccaccgctggcaccgtagctggtagtgcgatcggtgcaggcggtgtagtgattaccggcgtttggtgagttagttcagcaagcttaaccatggctaattcagttgtctgaacatcccaaatggcgttatgctggtgtggattgctgatattaaagagtgcggctaagccatttaatggcagatcatggctaccgaccttatggttgccacgattgatcaaggtattcgtataggcttgggcatcaaaaatcgtgaccgggcgactgactagctgctgttcggtgggggtcaattgctgataatactgagttagtaataatcgaatgtgtttcatgtcctgtgtctgatcccaaaaaacgagggggagttgtggctggataacttgctggataaatgcttttagaatcgtcagggggtcgccttgcgcctcgtaagcgacggtcgttaagccagttgctgataaaccggccaactttttgtcaggtaaaaagttaggatcatcgaagtaacgattgaaaaaaggcgctgtctgcgtatgatgggaaaaaccgatggcactgagctggaagatactagcccgtaattcgggtgattcgatgacgtgccaactgacggctttagcggagccattacgacgaaagcgagtgccgaactcgcagtcgatgattacgtaagcggtcggacattcactcaattccgttggtgaaggtaggatcgtgggttggcttagttcaccggccggctgcgcagggggaaactggtatcccagcgtcgccagaaattgaacggtatcctgcccgagctggttattggttactttagcgaccttcttttcagttaagacaatttctttacgcgccacgaataaaatatgatagcgctgctgttcatcacagataatttcggtcacgttgccggcaaggttgtattctgaagcgagtgctaattgatggtccttttgaatacggtaaacgggatggttgacaaagtatagacaattcaagttatttgagatcttacgctcaagtaaggttaggttcgttggcatcatcgacaacagctcctctgatctaagtacttatattttagcggctttgtacattagctggctagtgtttgcactgcagatcgaaccatgaatttggtaatcacgaattggtgcctggtgttatagtgaccgtagagtgctagttgtgcgtcaggttggagttggtaaaataaagtcaatgcatgcttgacgatgatgcagttgatgggcataggctcggtcgcctttaatggcgtgacttgtaagtacaacataaaggggtccaactttaatatcttgcttttatttaaatacttaacggttagattttttgactgcatgctaatcacctcaatacgagtatacgaacatacgttcttaaatgcaagcaaaataactgcgttaacaaatttattttaagatgagcgctaggtgcactggactgattcgaaataatttattaaaaatcgcaacgaatcaggcaagtcacggggaaaaagctacaaaaaattgagaactcttggtatgatgaatagtagtgaatgagaggaggccgagtcatggatcgaggacgacgcgcaacgctggaagaacgaattgcgatcgtaaagtatacgctggaccattgcaacgattatcgagaagccgctaagcattttaatgtttcgtatccacaagtctatacatgggtacgaaaatatcgacaacacggcatggaaggtttggtggatcaccgtggccgacccaagcaaggctaagtcagcattgtacatataaactgtgtgggcgagtgccctttgatggccaatctgacatggtcgtttaatcgatatcggtctctttaaagtgtccgttcctataaaatcaatagggacgggcacttttcggtattttgatagttttcgtggcgcaagtgcgacttaacgtacctagtgattaccggggcgcgttcttgtcatgggccggtattctcggtagaatgagagtattaattcaaagagggagtttacgtgtgatgattgacttagcggcggcacagcaagtattaaagaccacgttcggatatgatgaattccgaccggggcaaaaagcagtgattgaacaagtgttggccggtgaaaacaccctagcgattatgccgactgggggtggtaagtcattatgttaccaaatcccagcgttactttttcaggggctgaccgtcgttgtctcaccattgatttctttaatgaaagatcaggtagacgcgttaaatgataatggcatcgcggcgacttttattaacagttcactggatttccaagagattaacgaacggctccaagaactacgggcgggggattataccttactttacgtggcacccgagcggttagattcggattactttattcaagcgctgggccggttgcccattcaactgttagcaattgatgaggcccactgtatttcacagtgggggcacgattttcgtcccagttatttagcgctcagcacggcgattgaacaattgccgacccatccgcaagttctagctttaacggcgacggcaactgagcaagttgctgcggatatttgcggccgcttagcgatcgatccacaacatgaagtgaatactggttttgcccgcgataacttggatttgacggtggtcaaggaccaagacacggaccgttacattttagattatttgaaagttaatcatggtgaagccgggattatttacgccagcacccgtaaagaagtgatgcgtctgacgagtttgttgcaaaagcatgatattaaggccacgccgtaccacgctgggctagatgatgcggttcggcggcaaaaccaagaggatttcttgtacgaccgtgttgacgtcatggtggcaaccaacgcgtttggaatgggcattgataagagtaacgtgcgttttgtgattcacgcgcaggtccccggaactttggaagcttattatcaggaagccggtcgggctggccgggatgggttacctagtgaagcgattttgatttttcgaccggttgatattcaacttcagcacttctttattgatgagtcggagatggatacggagcaccgacacctggcgtatcagaagctacaggtgatgacacggtatgcgaatacccagggctgtttacaacagtttatcttgaaatactttggtgaaaaatccgcgccgtgtggtcggtgtagtaattgtactgatcagcgagaatcacaggatatcaccacggcagctcaacaagtcttatcgtgcgtcgttaggcttcattcccggttcggtaaaggggtcgtggcccaggtattgacgggcgctaataatcaacgggtccgcgaatcgaacctcaatacgttgtcgacgtacgggttgatgtccgggcagcgacagaagagtgtcgtggaactgatcgattttttgactgcgagcggttatttgcagtcggtgggtggtcagtatccaacgctgacagtctcagcgagtggagtggccgtgcttaaaggaacgaccacggtacaccgaaagacggcccaaaaggtgcagcagacggtgccagagaacagtgccctcttcgaacaattgcggacacttcggcgccaattggcggaagaacagggcgtaccaccatttgtgattttttctgaccggacgcttcattcgatgtgtgacctgatgccagaagacgatgcagctttcttaacggtcaaaggggtcgggaccagcaaacttgaaaagtatggtgaaacctttatggcgacgattcgagcggcagctcatgcggaatcagcaactagcaccgatgaggaaaccgattagatggctgattggtaaactacgagatgaaatggagtaacacgtatggaatttacttggcaacaccagggacaaccaatggcaatgaaacgattcttgacgacgcatgccatcagtatgcgaacaatcaaggcaatcaagcatggcaccggcgcgtttcttgtcaataatcaagttcaaacgggcgttattaccattcatgatggcgatattgcgggaattcaactaccagacgaggcaccggatacagcggtagtcgtcagcgaacaaccaatccaaattgagtatgaagatgctaattggctcgttcttaataaatcagccgggttaaccagcgtgccggggcctagtaatcggaccgatacgttggtcaatcgaatcaagggttatttgatagccagtcatgccagtaatcaacgaccgcacctggtcacgcggttggaccgggatacgagtggccttgtgttagttgctaaacatcgggtggcgcaggggatgttgacagagccccgaattgcggcgcaattagtgaagacgtatcaagcttggatcgaagggaccattacgccggctagtggcacaattgatcgcccgattggccgggtggctgacagtcctcggcgagtggtcaccacggcgggccaacgcgccattacgacgtatcaagtggaggcggaccaattgcagcataacgtgagtcggttacggttggaacttgtgactggacggacgcatcaaattcgggttcatctaaccgcgcttgggcaccccttattaggtgatgcgctgtatggcggtaacttggcgtggattcaacggcaagccttacacgccgctagtttacagttctttgaccccttttcggaacagattttacactttgaggcggcattgccagctgatctgcaagccttgaatcacgactgagttcagtttaggaccagtgaccatccggatgaatggttaataaaaatcggcactgctagaatgcgttgaacattctggcagtgccgatttttggttggcaaccgtctaaaatcaagctaacgtttagcgggtaagttgcaggcccgcgttatcctgaaggttgcggtgactattgaatgaggcgctagtgcttacgactgactaagtggcgcgttatcagccgttagcgtcgcaaaagttgcctgtaattgctgtaatggtgcggttaacgtgagaaaataaatatgctcgactccgttactgcgcatatcaatgaccccagcttcacgcattaagcgtagatgatgtgaaacggcggggcgtgaaatattgaccaaggcggtaatatcagtaacgttgagaccattatcactgttccccagagcaatgataatctgacgccgaattttttcggcgaagatattaattagtgtggcactttcaataagtgccgtttcggattgttgaaaattagccatggtgactgcgtcctttcaaattcaatttacacttaaggactaactccccccatcggcagtacgctgaattagttgttaagtgttggtatgacagctcgattgttcaagttctggtgaaatagttgcagccaagaaaactttaagtctacaagttgtcagttagactaattgttattggaacgttcgtacttatgtataattaaagcaagtcgttaatcgattgtcaaacctttttgttaaaagtaagtactattagcgggtttaacaattgctgttcgtttgataaccatatttttatgttgaaatgcgttaaaataaaaatagcttttgaatgaatgatgggagtggaaaatgtgaaagtcttaggaatattaggttcgcatcgcgctgatggcgtgactgcccagctactgcaagccgtcttaaagggggccgcggccagcgctgacacggaactagtcaacctcaacgattatgagttgcgaccagatcacgatagtcaaccgaatgctgacttagacgcgctggaagcaaaattaatggcggcggatgtctgggtattagctgcaccaacctatttggggagcttatcgggggtaatgaaaaacttctgtgactgttttcgggggcggatcgcacggtttaattccgtgggtgaagcagtacctgatcgctttaagaacaagcattatgtgacgatcacggattgttacgcgggtggtattgaaaattatttgaccggcgtgactgacgcaacgtttaaaacacttgataaatttttgacgatgggtggtctcatcaaattacgggagattgtcgtaactaaaacgtggggtatgcaaaccatcacagctgctaagcaagcagaatgtgaacgggtcggcgcgcgggctgcacataaaaaggaaagggatgacagtacggtgaaacggtatattcaattattcttcatgattgcggtgatggcactactaaccatgggaatcgaagcggggattcaacaattgattccgctgaacaatttttgggcctactacggcgtctttgtcgtcgtcttttatgttcttttagcaatgattttacatttcttcactgttgttaaacaccggcgtcgttaagggatacggcatgtgcattcagcaacaacgacattaaaattcaattgattagcaagctgggcttggcgtcttaatcgccggaggtcagcttgttttgctataataagaacaattacgaagtaccagcgattatttcagtgtctacgcgtataattaatatggtatcgtcgaattagaaaatgaggacacttggtactggttgccaggcgtatgaaccataattaaaacatgttaaattagatgaatttttatttggcagcatgctgtgattggtttcggttttggcgcatccaagctgccggtttttgaatctaactttgtcaaaaactaatcatgggtcatgcccaaaaacgtattattgatttcaaaattaattttgttaaataaaggctgtcaatcaaggtacgaggaggaatagcatgcaagtttttggacaatttattgcaacagtcggttggctaggattggcactagtcgccagcgaactaggtgcgacgttaatccattggctcggtcagtgggtcggatttcgattaattggtgctcgaattgtccggattaccggttttcgacttcaattaagtcgggttcgtggtcattggaaattagaacgaccgctgacgcgtcatccacatatcgtggcagcacccccggcggatgccaaacggttcaatcacgccatttattgttttggcggtggcctgttcaacttactgacggtcatgctcagtttaataactctgaatcaatttaagtttagtttcgatttatggttgttttcgttcattatttggatctgggtcaatacgttgaaagccgcccaattattaccaatgaacttgcacggttatcccacggcgggccaggaatttcggcaggcacgcgaatcaacggcggcgatgaccgccgcgtatgtcactgcgtgtgctgcggccgttaaggttcagactggtagtgtccgtgaccttgatgcgagtatgattgttatgccgcgcgatggtggcaatcggaattatttagtcgtccggcaagcctggttgattctggaatggggacttcaacatgggctggacacccccgaactgttagcggggttgagtcgcttggagccaagtttcaatacgttgccgccagctgatttggcgaagtatttagatgcgacattgtactggaacttggtcaccaatcatcgtgacccccagatcatagcctggtatcaagatgatggtgttcaacagttattacgtcgttaccaacctttggctcattataagttaactgccgtttatgaatggcgggtccatcagcaacctgaacaggccctggcattgattgaaaagggactaaaaattgctcagcgcctccacgatgaggaagaaattgcttggctgaaagctttacgcgttcaagtaacggcctagattaccgtagaaacttagattctgttaaagattgccagaatcgaagtttgtattggaaaatgggtggtaaactggtgaccattgaagtgaaaaaaggtgaaaatgtgaaacagcgaatcaagcaacggtgggggttgtggttaacactgctggtgattattttaggactaatcggggttggattgacccgagttaatgcgggactttatcagcagacagttgcacaagtgacccacgtgcagactaagagtcgaagcacgacgacggatgaatttgagaataaggatgcgacagtgacacagttggtaacggtccgggtgctcaataaggcacatcgtggtcgaacttaccagatcaagaatacgtatacgcgctcaggcgcaatggatcagccgtatcacgtccgtaatcaagtcttcttacggattcctagcgatcatagtagtgcagtgacgattcaggggttaaaacgagataccgcattggcgtttgtcgcgtggttagccctagcactgctcttgttaattatgcgtttcagcggtctgatggcctttttgagtgtcgcgctcaacgctgtactattttatgccgccattcagatcgatttagctactaatggtggtcacatttacctgctctttggcgtattggccgtaatcttcgccgtgctcacactgttgctagttctcggttttagtcgtcaaatgttagtaacattgggtgcgactgtggttggcacgggactggctgtcattattagtctgatcgtctttgcggtgacccatgagcgtggtgtgacttatgaatcgatgcagtacgtgacgcaggttccccgaccgttatttttagtcgaaacagtcctcggttcactcggagcagtcatggatgaatcaacagatattgttgcttcattgtttcaattgaaaacggagcgcccggacattgcaccacgacaagtatttaagtcgggtattcaaattggccggtctattatgggacccttgatcaacgtgctatttttgattttcatggcggatactttcgcgatgactttgctctatttccgtaacggcaatagctggggttacacttttacaatgaatatgtcgttggggatggtccaaagtttgatttctggtatcggtatcgttttagcgattccagtagccagttggttagccagtcgattgatgcctaaggcggtgatggcatgaacacgattaccgttttaggattgatcttactaggattgatgacattaattggtggtaagactggagcgacggcctttttgagtttgttatttaactttggattgttgtttttagccgttgttttgatttcatggggctttccagcaatgggggtgtcgttggtcattgggacaatcatcttggccttcacgattttctttggggaggacaacgaagtggcggccaagccagcttatattgcagcattgattgttatggtcattttagtgctgattatttttcccgttgaaaattggatcatggcgcagggctttagtttagaagatagtgaagatctggaaggtatgtcgttagccattggggtctcctttattggcgtagcagtaactgaagcaattttaagtacactaggggccattgcggaagctgctattgcgattgcggcgggtctgagtgaaattctggcgcagcatccgcagttgccaactaagcgactctatatcgatggtatcagtattggtaagcagattatcgggacgacttttaataccttgtttttcggcttttttggtggcttcttggcgctatttatctggtttgcgggcttacattattccttcgggagtgttatcaataataaaatatttgttgcggaagtattaatggtattattctcgttaattggcgttatcctggtagttcccgtcacgacgtgggtgatgacgattcaacatcggcaacaaattaagcacaacgattgacgatgaccgcgggatttgctacggttgagaaaacagttgggagcgttgtgatgatggaaattcgaacggcacaaccgcaagatagtgctcaaattgcaccattgattgcgatgatttaccgtgatatggaaatgccagtcttaaaaaatgttagcgaggccgacctattggcaatgttgactgagttgtatcagcgaccggccaatttagatgggttagcgcagacttttgtggcggtcatggctcacaaaatcgtcggtgtcgcgttcgggcacttagcgaagaatgaagccgctgtaaacgatttgttgcggacgacttcaggtcatcatgcggggtttgaggcaccactggaattaggtggtgagacccggccgaatgagtggtatttaagcatgttggtagttgatccgcaagctcagggccacggagttggtagtgccttactagaagcattaccaggactcgttggtcaactgggggccacgaaactgagtttaaacgttgatgatggcaatccccgagcagctaagttataccaccggcatggttttgtcccggatggtcagctcatgattggcacacatccgtaccagcacttggttaagcctttatcataataactgaaatatcgtggtgtgtttcttagaccacggtatttttttacgtcattatggcactgaagacttttctattgagcatgacacagttagaattaaactattgaacggattaggaaggtgaacgtgccatgcagatttatttcattcgtcacggtcgaacacaatataacttagaacaccgatttcaaggtggacgagcagattccccgctggttgctagcggaatcgatggggcaaaggccgctggtgattacttaagaaccacccaattttcagcagtatatagcagtccgcagcaacgagcgctggatacggcgaaatacattgtggctgccaatcagtggcaaccgtcgattcaaatcgacgatggcttgcgtgagtttgattttggtgattgggacggcaaacaggaagcggaagtacagccgcagtcctacgcccaagttatttttactaaacccgccgaataccgaccggaactagctggcggtggcgaaagttatgcggattttgtcacccgaacgacttcgacgctacatcgtttgattgatcaagttggggtagctagcacgcaaccactattaattgtatcgcacggcctggtgacgacgatgactgtcaaggcgttaatgggtgtccccgtagcagaattacgagcaccttttgtggtcgatgggcaagttatgaagacagtcggccacggaatcgtggataatgatagcctgacagtgttatcgacgacggataatcagcattttgaactgacgacttggaatgaaaccgggtacttgaagtaaatggctgagccaagtacaacgccttactttagctgttaacttgactctgatcgataaaattttaagtagttagtaaagggacgcttctggcatggtttgtcaggagcgtccctttgaaattaacggttgattcaagttatttgtctgtgttccggttcaaaactgttgttaatatgatttatagtgagcgctcgcacgtgatagtgctttaccacagcccactaaaaatactagctgccgccacgccccaataatattcggaggtgcgggcggtttgggtgtagagtgtgttaattgcttggagtggttggtgcatgtgatcacgcatgacgcgcattgccatgccgttaactttagtggcaattaataaatagttaccgttcttgtcaagttccatagcatagcgaagtaagtcagcacgaacttgtgcgtcttgtttaacttcaggatcattataggcaacgtcgatttgttgcatcaaacgcttggctttatcatttttgttcacgttaatccccccatgccaagagtatagcacaagtctcagacttaaatgttagcttaacgggaaaccgcccgcatttcggatagtaaaatgcggggcggtttttatcagtccgcttgttttttacatgtgatttctgcaacgtgatactggtgatttttgatatgccctggtcgctaaattaacgcggccgccatcacttgggccacatcttggctttgccaatactgatccactaatggtgcgaaagcgtggttcaagccctgatactgaataaacgtggtcgcagtatcggcagcggccaggcgttgtgcataagcccaagcttgtggtcggaagggatcaaactcgccgaccatgatcgtggttggtggtgtcattgtgaagttttcctggtgtagcggtgagatgagtggagaatgtgaatcaaagttctctggaacataataatccgtcatgatgctgtcaagttgccgaaagaggtcgtgatagttggtgagaatggcacgctgtgagtcaataatcggaaaggcggccaaatcccagagtggaccggcgtggtcagcatttggggcggtaactgggtacaacagcagttgttgattgatacgattgctaccgagttgttgattcagatttgttgcagccatgatgacgttagcgccagccgaatcgccagcaacggtaatcattgtttcagcgtcacgttgttccaaatattggaaaatcgcgagcccgtctaaaataccagcgggtgctggtgcttctggcgctaagctgtaatcgacattaagaatctcgcagtgacttttagctgcgaccagctttaaaaggaccgtattattgccgggaacaccgccgtaaaaggcaccaccgtggaagtagaccagtactgtgtgattaatgacattttgtggtgtcagccattcaacgctgaccgtgcgattcagagccgtaatatttcgactttgaactgtaaccgcatcaccaacagggtccgcgatggcgggggttaaactaccactgcggagcgccgctagatcattttcaaggatggctggttgtttgaaggccgttagtgtttgaaggacgtgcgggtcaaattgttcaccggcgatgtcgttgttaaatggtttaacgattttgacgacgccgttgacggttgtttgaatcgaattaattgttggcatcatattcaacatcctccttaggttcaactttagccgctgcctcggccttgttggcttgtaattctttttcgtctaaccaatagaattgcatcatgaaaatcatcgcggctaataaaataatcggcatccaaataaaagcgagattaataaatgtaatggttcgtccggactgtacagctgccttggcattgaattgtccccatgcgagaaattgaccggctagaaaaccgccaattcccattcctaatttggcgccaatcattggtacggcagataagaatccggtttcatttaggcccagtactttcgttgagtagtcaacggtatctgatagcatcgcgaagacaatcgtgaacgtgatccccatcgcaatcaagaaaatgacggagccagcaattagtaggctcacactacgcatcttttcagcgattggcagcagtagttggccgataacgcccagtacgagtgaaaactgcaaaacgttacggttcttaaagcgttgtgataggaatggtacggacaggttcccgatgacggaaacaaagccaatccccaggaaaattggcgctaattcaggccgaccgtagacgtatttgataaagaagatcgctgaatttccccgtagcatccagaaggtttgtagcagaatgaatgagcaggctaataatagccatggtttgttgctagccgcacccttcaagctttgccagattgagagtgattcggctgactcagtggtaccgtctggattttgtgcaccgttagtttccttgagattgagaaaagcaaagatgaagagtcccatgataacgaggcctaagataatagcccagagggtgaaacctttcgactgattgcctttgccgagtaatttaaccattggcaaagtgatggccgccactgcactggtcccgatggttgtcatgaccatccgagcactcgctaacttggtccgctcaacgctatcatcagtcaagcttggtaaaatcgaagtaatgggcgtgttggcaccagaataaatcaggctaaagaaagtgtaagtgattgaaatgtagacgagtcgcattgtggtattgccgccaaatgatggaatcatgaatagcgacatggccagcaaccctaacggaatgccaaaccacacaaagtaggggcgcgattgtccatacttcgtgtgtgtatgatcaatcaaataaccataaatcaatgcatcaaacgcatcaatgaagcgcacgacgaagaacagcattcctgcaaaagcagctgagatgcccgcgaccgttgtgtaatagaacagtaagtaagtgctgaccatttgccaaataatattaccggccatgtcagtggaaccgtatgcaattcggcgtttccaagtttgaaaaattgacattataaatccccccaaacgaattaaacttaaactaacaatgataattaaccccttttatcaacataattatatttccaaattaggtgaattatcaaagataggcgatagtttggctggttaataatcgaaaggtgggtgcatcttttgtacaaacacgactgatgcctgttttgtagcgctggttgggagaaagccaaacaagcaaaaaacacccccagcaacggccaatcaaattagctgttgctgggggtgttaatggttaaagacgcgtgtcgcggatgtcaccaattgttaacagaaatagaattgaaaatagccttgtcggtcagttctgttttgaccattaatcaatggttggtttcagagctagtgctttagcggcttcttcactgtcatcaaagtgatgcttagtccggccgatgatttgataatcttcgtggcctttaccagcgattaaaacaacgtcgccgggttgtgctgcttcaatggccttggcgatggcaacgtggcggtcttcgtagacgggcacgtcggcgtttggcacgccggcaaccatgtcatttagaatcatggttgggtcttccgtccgaggattgtcagaagtaaagattggcttagtactgtgttcgacagcaattttagccatctttggccgtttcgtcttgtcgcgatcaccaccacagccgacgacgcaataaatatccttagtcgcgaaatcttgaatcgtttctagggcattcaataagccgtccggagtgtgtgagtagtcaacgatgacactgacacccgtgtgggaaggaacggattggaagcggcccttaacgccggtaaccttctccagtgacttaatgatttggtcttcggggatgccactagcgtaagctgcggcgaaggccgccagcatgttgtacacgttgaactggccaatcagttgcatcgtcacgtgggttacgtggccgaagacggagaggtcaaattcagtcccgtggctcttgatttcaacattttgtgcgttgatcatggcatctggtttgagtccaaatgttagtacgtgcgctgccgtatactgttcaaattcacggccaacgggatcatcggtgttcagaacagcgaccttattagttccgtcggcgctgtacttattgcccagttgtgcaaagagcatggccttggcttccgtgtacttagccattgttttgtggaaatccaaatggtcttgcgtcaagttcgtgaaaacggcgatgtcgtaatcaatcccccagacccgtccgagtacgagggcaattgaagaaacttccatggcgacagtttcaacaccggcatcccgcatggccgctagagtccgttgcgttgtgatggcgtcgggggtggtgttggcagttggcagtttttcatccttgattttgcgatacatggtcccaatcaggccggtggcttgctgctgatcacgatagatttgttcgatcaggtgggtgacagtggtcttaccattggtacccgtcaccccaatcatccgcatcttttgactaggcgcaccgtagaaaacgtcggcaagaattgccatagcgcgttcggtgttttcaacgtagatgaccggtacgttgacgtctaaaggttttgacgccacgatgatcttggccccttttccgatggcctgatcaacgaggtcgtgaccgtcgacgtgataaccaacgacggcaataaacatggcgccgggctgaacttcgcgggtatcctgcgtcagcatggtgacatcaaagtccgtggtcaaggcgggctgaacctgcttgaattttaaactattaattaattgacttgcttgcataatattagcgtccttttcaataaagttactgtttctagaatacatgcaaaccggataattgtcaccccaaatgagaattgaaattaagcttgtaatcgctcggtacatggtgtactgctggttgaacgtgccatctccaggccaatctaggtcaacaaaaaagcccggcaattaagccggacttgcagggatggttattcgattcctaagaactcatcatgtaaggcgttcatggccgcttttaaatcggcttccttaacgagcacccagatggtcgtataactatcggtcgattgtaaaatatcgatatgttgtgcagctaatgccgagacgatccgagcagtgacgccgggtgtcccagtgataccagcaccgacaacggaaactttagcacagttcgcaattgactgacaatggacgtgcgcgtcagtcagtagttgcttggcaacgtccgcgtcaccatcaaccaggttgaagacaacttggtgtggtgtaatgttaataaagtcaacactcaaaccgtgctgtgccatcaattggaaaatggcacttgaacttaacgtatcggtaggaacagtaaattgcgtcaaatcagtttggtgtgcaatccctgtcacggtacgataatgttcgatttgggtcgtggtccggtcagtgactaaagtccctaattcgtcgggttcctgataagttgaccgaatccgcatcggcacgtgagcttgttctgcaatttcaacagcacgcggatgaatgaccttagcaccttcatgggccatgttagcaagttcttcgtagctgatggccttaatgaagcgggcgtgggtgacgagtcgtggatcggcagtcatcatgccgttgacatcagtaaaaatatcaacacgttttgcttttaaagcggcgccgaggatggctgctgatgtatcggaaccaccacggccaatcgtagtaatgtggccgctctcagtagcaccttgaaaaccagttacgactaccacgtcggcgtcaataaaggcgtccgtgattggtttcggatcaacgcggagaatcttcgcattttgaaaatcgtcgttagtcacgatgccagcatcatgaccagtcatggccgtgacgtttaggccttgcttacgcgctaactcggtaaagacagcggtcgagatggtttccccaactgagaccaacatgtcgagttctcgattggttaagcgggagtgctcggccccaactaatccgagtaatgagtcggtggcgtaaggggcacctttccggccaattgctgagacaacgacaatgactttatcgccctgatcgacggcgtattgaacgtgctttaaagcttgaatacgggcggcttcgtccttgactgacgtgccgccgaacttttgaacaataatttccattgatctaaaactcctcgactttttccgcaacggcgttagcttcggggctatccatcaagtggtcagattcgacatagagtcggtgccacatcatgaaggtgaggaccgtccagagtttccgagaattatcccgaacgccggccttgtggtcatctaagagtttcaagaagtagtccttattgaagtattggtcagtttgcgaatcgttaatgatctgcttagcccagtcgtacatttcatctttgagccagaaccgaattggtactgggaaaccaagctttttacggtgaaggacgtgcgctggcacgatgtcttcgaccgctttacgaagaatgtactttgttgtgccgtgactaattcgaagatcagctggaatttcggctgctaagttatacacttcacggtcaacaaacggggtccgcagttccaaactgtgcgccatcgttgtccggtcggcgttatgcaacaagtcaccgtttaaccacgtgtgcatatcgatgaattgcatccgactgattggatcatagtcgacggattcatcatagagcggttgcgtgatggactggaacggatggttctgattgtaattcttgaagaaggcttgtttttcttgttcaccaaagataaaggcgttcccaacatagcgattttctaatggggtggtccctcgtagtaagaatgaccgaccacgcattccctctggcatcatgagtgcgatacgcttcaaggcaccattaatcggtttcgtgtagcggaacggtttcaatgattctggttcatgatagatggtgtagccaccgaagagttcgtcagcgccttcaccagtcaaacaaaccttaacgtgtttgaccgcttctttggctaagaaatactgcggcacagcggccgggtcagccaacggatcatccatgctccacacaaagtgcgggaaggccttcatgaaggcttcaggcgtaatcgtcatgctgtaattcttaacaccaagcttttcagcggtctcttgagcaacgtcaagttcactatacccttcacgttcgaaaccaacggagatcgtttcaaggtttgggttgaagttttttgcaatcgcgacgatgattgatgagtcgatcccgcctgaaaggaaagaaccaactggtacatcggaacgcatgtgaatcttaacggagtcaattaaggcatctttgattttttgggcatactcgtcttcagaacgttggaccggatggaattcacggtgataataccgatcgatccgtggcgcagaccccaactttttcgtcaaggagcaaccaggggcgagcattttgatttcttttgtgagtgtttctggttcaggaacaaattggaacgtcatgtaatcttgtaaggcatttttatcgaaggttttatcctttaaaatcttgtaaatggccttgctttcagaagcataatagaagtcatcgccactgatagcgtaatagaacggcttgatcccgaactgatcgcgcgcggcaaataacgttttttcttgtttatcccagatgacgaaagcaaacattccccgtaagtacttcgttgcgtcagcgtggtacttggcgtacatcgcaagaattacttcagaatcggagcttgttttgaattcatagccttcttgtttgagttgttcacgtaattcaacgtagttataaatttccccgttaaatgtcatccagtaacgttcattatcataagatagtggttggtgaccaccggctaagtcaatgatacttaagcgccgaaaacccatggtaatgttgtcatcagcaaaataaccgtcatcatcgggtccccgatggacaatcattttagtcatttcgtggatggtctgatcgtaagctgtgttatccgctttagtccgatcagttaagcaaccagcaaaaccgcacatgtctgttcatctctcaatctttaaagtttagacagttcttatctactatatgtgtacagatggttcgttgttaatttacccgtttcattcacggatgtaaagcactctgaacaattataacggtttcttaccaatgtctgtcataattatgcttgacaatccgcgacgtacactttgactattatacttgctttaattcataagataaagcggagcgcgcagatggaacgctttcattgataaaaatttcatgttgcgcgaaacgtccaatcagttagatgccggttccttggcggagcggatttctactgactatttggttagttcgaattgaccgttattgacatgacacatttagatgctgattgccggccttatggctgaaaaagtcacagaaaaatcccgcaaactcatgcacaaatttgcgggacgtttaagtgggaatattaaattagatgtgcccttgcgctctaagcccagccaactaggcgcaatacggccatggcaacgatgcctgttataacgacggctagtaaacttttggtgagcactcctgcaagaatggcaggaattgaggcataaatatttgggagattaaattctggccagtgtcccgcatggtaggtgagcagactttcaacaaaaatagcggtcataatggcaattggcacaaatgataaaaagctgattagccattgggggactgacagatttttaatgatggcaaacgggacaatgcgtgatagccaagtcacgaggccgcagagtaagatggtcacaaaaatgtaagtactcatttatggtccaccaccattccaaaaccgcaaccgagtagcgtcgcaaagatcaaagccaagttgcccggaacccaacgcatgagaaaatacatggcgagggccacaaatagtacgacccacaactgggtcggcaatgatttactgcgatccgtgatgatctgcaagtaaagtaaaccaatgaacataccaacaacggcgaaatccaagccgaattggttagggtcagtaatcaagttacctaaaaggcaccccaccactgtcgcggctgcccaaaccaagtaagccacaatgttagcagcgtgtaaccaactcgtttttaattgttgattggtctgattgagcttgttcatgctgagcgcgaaggtctcatcagttagtaacgatcccagtccgatattttgcaataacgactcttttttgaaatattgagcgactgacatgctcattaaaatcatgcgtgaattaatcaaaaaagtggataagacgattgccgaaatcggactacctgctaggagcatactgacgataataaattgtgcggaaccagcatagacgattagtgacatgagtagaacggctcaaactgataggtgactcgtgttggcgacaatgcccattgctaggccaacgccaatgtatccaaagacggtgggaatgacatctttgatgcccgcgcgaaaggttaaactagaatccataaatgtacgacctccgattcaataagtatgcgttaaccaacactaaatgggattatctgacaattagtgtggttcatgaaacaggataactatgtaggttaagtttgagtgcgtgttatgatgaaaaagcacgcttgatatccgccaatagtaaggtgacgaatgaggcaaaggcgggttaagaattagtttaatactttcggtgaaaataatgaagaaaattatcattgacttttaatcgtgacgttacgaaattgttgcttgcatttcaaaagctgggggcgtaacataatcacattgattttttgaaaggacaaatggtgagagaaaatgactctggaacaattagcagcccatagcggggtcgctgctgataaaatcgtcgcctataccaatgccgggttattaccttgcaaggatgtcaacgcgcattttagcgccgatgatgaatattggctagatatggtcaattgcttcttagaaaatggctcatccgtcgaggatttgaaagatttaatgccactttgtgaacagtgtgcagctcaataaataagtaagttaagacaatcgcaccgattctactagaattggtgcgattgtttttttattactcatcgttattaaacaatcatgattaaaacgtgccgattcttaagttcaaaagcagccagcttagacccgctgggaaaagttcaagttagcgtaaatatgcttagattggttcgtcctacatcgacctccaggcatttctgccaattgccggaacgtggtgggcacagatttgagccgaaaaaccacgtctcaaatactggcctttcactaaccaagcacagaacgcttgctaagtgaactttcaccactgggcattgtcaaaaatgccttccagtcgggatagtattcgaatggcagacggtgaggtacccaacttttgatgaattggtcgttgcttttcataaacggtaattttgtcaatcaactgtcagactaaaaataatattgagatggctcactaatcctgaatcggtgtagtaggatttaatctcttgacagagtgcttaatgcacctagcgctttgtttaaacttccagcatcaaaatagtcagctactaattgtaccaaattaggtggtcgttcatcagccattcgagcggtttcccgaccggaggggctgggtgacaatgctcagtagccaaattattcttagtcggaagtgggttgcttccggcttagaataagactcgtatttgagatgacgcgggttatgcgttagctcaaatcgacgtcggcttacgttccagcaattgtcacccagccccggaggtcgacataggacgcgcaccggctgacgaacaggaatccacctaatcggcacggtttaatcataattagtcctgattggtgttttggagcggacactattttttaaatgttcaatcggaatataaattaatttatatgggctagcaggattgagggactaacggtatacttattgaagcataaataccaaccaaaaaggatagtgaagcagggatgaaatcggggaagcaccgggtatcattattgatactgttatgtttgatggtggtcggtttagctggctgccataacaaggcgtattcgcagtcaatcgagaaggggttaaatgcggttgctgagaataaataccaaaaagcgctgacgtattttgataacgcgctagcgcagaagcccaaggatgaaaaggcacaggcgtaccgggatcaaacgcaggcctacttgacgaccacatcggagttgaaggccggaaaagttaaaacggcgctgacgacggttgataagggtgtcaagattacgaacggggcaacaagtttgacgaataagctgaaacagttgaaagtcaccgtaaccagtgattatcaggaatatcagcaattgtcagatgatgttaaagcacagttaaaggtgaagaacggcaactattcagcggacgtgctcaaacgttgcgcagccatcaactgggataaaaagccatatttgaaaccgttgaaggctaaggtaaaacagttattgactgcggcaaaaaaggccaagacgaatatgaaagttagtacggctgaagcgaaacgagcagcggcgttacgtcggaagattgctgccgctaaaaacaagtggaacatggccgcattagacgatgtgcccgattggttcattttggcactttttgccgacgatagtgatgtggatgatgctgctgaagaattagatgacgaatatgccgatcaggccgacgataatgacgattattcggatcgggatgagcaaacgactgattcgaatgatgacacgaacgacaccgacgcggattcggctgatgacgattggagtgatcaagatacggattcgaatgacgataccgacgatgattccgatactaatagcgatgctgacagcgattcggattactcagaagatgatgacgatgaagattcgaatcgtgatgacgccgatgacagcgaaacccaatccgatgacgattacgatgatgatactgatagtgagtctgatgacgacgattatgatactgatgatcaatatgacgatgatgatgactacgatgacgccgagagtctactcaacccggcacctgttcaaccgtcagtggccgaccggctgtttgcgtcggctagttgttagtcgttcagcggtaaaatcaccaaagatcgtctgacagttttaataatgcagttatgggcgacataaaaacaagcgtccgcgttgattagatcaacgcggacgcttgttttcttacgtggagtttgttgccgaacatgtctgagtaccagttgctcacgggcaagcctttatcttagcgttgattaaggctgatgtttaaagcgagcgtaaatcgagctcattgttgaaaatccgatgactattaagaccatgatttgtaatacgccagtgggttgctgaatttgcctgacgataatgtaagtcagaatagccaagttgatcagccaaccaaatcgtcttatttgcttaattataaaatttttagggtctgttttactaagcatataaagtaaaagggcgatgatgatccaaaacaatcctgatgttgagtgatagtacacgtaatcattcctttagacgtctgactttctaatgacatcgtaacaatcaacttggtacgtgataatcgtatcatttgctcgaaagcatcaaaatcatgttttagtaaagatagtgtacattttcagaaaagaaacgtgaattttttgtaaaccaccggcataattaaccggcgcatcgattttgaataagtgtggtcttgacgctggggcgccggcgctagttttggcaagacgttagtgaaaggggggggacaagccatgatgatctttagacaacaaagaccccggcatgccggggtcttgtcagctatttttaattgttagttcaagttatttgctagctttaacggttttaagcatgctctgaatggcattggcttgatattgagcagccgctgctttttgaacttttgcgagttgcgctttgctcattgtcgggttcttgaccattgcggccttgacctgattagtcacgtagactttagcacgcgcttttaatgtcgcttgctgttgcttcatcaatttactgaattgtttagcttgggttgtgctaagtacgacccagttcttattgatatagaagtagttggttcgcttgatcaactgtttgtcattgttggctaagccaaaccagaacttcatggcgttactcttataagtccaccgtgtcgtcttagtaactaacttaggtgtcgcggtcgtcgtcttaacttggttagcagtcttgacgctggctgtcgtatggctaacttttttctgattagtggtctttttataaatatagacccggtgcttgtcagcggtacccacactttgatagagcaataaatcaagttgcttgctactaccagcagactttaatgattgcgtggtggtcgtcgttgttttgaccatcccgtaatgttgaccatcattcttggagacgaagacgatcgaggtcactaagagtgccgcaaagataacggataggctgattcgtaacgtgttttggtgaacgtagataaatgataagaagagcgcgattgcgctaacaacgagtagtacgagaatcattagtcgttcacctccttagtgttcattactggcttaacggaatgctgcttgcctttcatgaagaacgcgacgacgagcccgacaactgagaagcccacggcaacccagaaagccgcgtggtaaccatttaaggttgcgttgaaatagctgttctgataaccaagtggattgctcttaatcaagctatgagctggttttgtggcgtccgtaacgtttgataagacggaagtcaagatggcagtcccaatggaactagcgatttgacgcgtcgtgttgttaacggcagtcccatgacccattagttcaacgggaagggcgttcatcccagcggtagttgccggcatcatgaccatggcaatcccaaacatccgaacggcatagagaaccacgatgtaaaccgttgcggtattacgagtaatgaaggcaaatggaatggtcccgattgtcagtaaaaacatccctaaaattgccaagcgtttggcaccaaaacggtcaaaggcccggccggtaattggactcataacccccatcattagggcaccagctaatagtgatagcccagattcaaaggcggagaaaccatgaataatttgcaggtaaagtggaataaccatttcggcccctaccatggccatgttagcaactgagctcaaaatagctgcaattgtgaactcggcatgcttgaagacccgtaattggaggaatggattttccatcgtcaattgacgccaaataaaaccaatgatgaagataacaccaataattaaagttgagagaaccacggttgacgtccagccattgtcaccaacggatgaaaagccgtatagtaagctcccaaaaccaatggtagaaagtaccaaggatgcaaagtctaattttggcttagacgtttccaagacgttggccatgaagaagaagccagcgattagaacgattgcgacgattggaacgatcaaaccaaataaatcacgccatgataagttgtcgataacccacccagataaggttggaccgatggctggggccaaaccgataacaattccggcagtccccatggcagccccacgcttatcagcagggaagatagatagcataatcgtttgaagtaatggcatggtgaccccgaccccaacggcttggatcaaacgcccagccaataagaagccaaagtttggtgctgtccaacagataatagtacccacttcgaaaatggccattgcggaaagatataaccatttagtggaaatccgtgaacttaaccacgcactaacgggaatcataatcccgttgactaacataaacccggttgttaaccattgcacggtcgacgttgtgatgtcgaaatctttcatcaacgttgggaaggcagtggttaaaatcgtttgattaagaacggtacaaaaagtaccaactaataaaactgcaatgagcaagccacggttataaggcttcccatgcgtatcaacaggagttgacaagtaaatcccttctctctaaaaaagtacgttgtctaatataatcggatttatcgactttgtcaacaaacttgacattaatattaaaaataatatactgagtattgaaaatgttagaaaagaggttgacccgtggataagcaagaagacggtgtattttttaagaaatttaaagaacagctgggtaagcatcaattcacaatcggaattagcgatttggcgaagatgaccggcgtctctcagacacagctacgttactgggaacagaaaaattatattcatagtcttaaagtgagtgagaagaataccacgcatcgttattcgtatggtatgctgatgcgtgttcattttatcaagatgatgttagacgagggttttacactggcagcggctgtcgagcgggccgatgggtataataaccaaatggaaatgatgcgcatctttatgatgacggcttttcaaggaatcgaagaacgggatggtcaccacatggtcaagttgggatattttgacgaagcgaagacacaacagctttattgttatattcaagatgagacgccacattatcgactttatcccgttaattcagagcgctagcaaccttcagcttgtgtaaccgattaattaatgttaaatttaagttggtaaatgtcggtaagtcacttgggcatttaagtttcccgttcgtcaaccgatcttatggctgggttgaccgttgtcatgttggtcgtgttttgaagtttaactttgcaaaaggatttacaacggagcgcgaataagcgctgagagatgcctagctagaactaggtagtaatcgtgcataaaacaacgtgtaattgaaactagtagtagtcttcaatcgcccggtgatgatatttaccagaggtcccaagtgctgcgggaaagcttggggcttttttgtactttcgtacgttaaaacgtaatctatcagtgtggttatcaacaaaaaagagaccgagtatcaactcaatctctttaaataatctataagtacgcgtggtgcttgtctttcatttagtattaattctacttctatatgaaataatcacgagtagcgcgcgttaattaagtaggaattgttaagatgtcgcagtttgagcaaacttggcggctaaccattcattccatggtagtgctggattaccactagtaaagtattgttgatcgagtcgatcaatcaagttgacgtaggcggtaaatgaaaaactaacggtgtcactcaagcgctgagccttggtcatgtagcggccgtaagtaaggtgttcattgatgtctgtcatatagctggcaacatcatagttggacatcatttcaaggttgttagcgtcaaaaagtggtaagtagaatgcggcaaagtcttcaactgccttgtgctgcaaagaactatccaattgcgtaattgataattgagcatcatcattcacgatgcggttcctccttagttgaacaagcacgtttctaaattagtaaccaaattggttattttgcgctacaattaattatgtcacgattaggcaattatttcaaagctttgtcgttattagagactagaactggtgtctcaattgtagtaagatgttagaattatattagagagaatcagaagtaactatttagttgaggtgaagaatattcatgacccccatgaaggaagattacttaaaaattattttcgagcttggtggtacgaaaaaaaaggtgtcgaataagcaaattgccttaagtttagacatcgcggccggctctgtaacggagatggtcggtaaattagttcaggaaggcttggctaagcataccccgtatgctgggatttcgttaacaaagaaaggcattcgctacgctgaaacgttagttcgcaagcaccgaatctgggaagatttcttagttgataaattggattatgatttgccagacgtgcatacggaagcggaagtgctggagcatgtgaccagtgaacgactagtggattctttggaagcctttttaggcaatccgacgcattgtccgcatggtggcgcgattcccgataaggatggtcattatcaggaagacagtcatgtgagtttagcagatacgcaggatggcacaacggttacgattgagcgatttattgataatcatgatttattagtttatttgcatgatacaccgctcaagattggacagcaggtcacggttttaaagcacgatccatttgaaggccctgttaccgtttccattcagaaaacgggcgaggaaatcccagttagctataaagcggcgcacaatgtctttgtaaagtaagcatgcggcacctatttccgaacaaacctgttaattgttagttagttattctgtttcatttatcatcacataaacatttcatggaaatcatggtgtttggctaccctttttagaaacaatatgctacaattgttcttgtagcttggttaggtaattttggtcagatcgtttcaataaactatccccatttgtaccgaatcatgatttacattattttatacgtgcaaaatgcactaggaggattttttattatggaacacggaacagttaaatggttcaacgctgataagggttttggttttatcactcgcgaaaacggtagcgatgtattcgtacatttctcagctatccaagaagacggcttcaagagtcttgatgaaggccaagctgtaaacttcgacgttgaagaaagcgatcgtggcccacaagcagttaacgttacaaaagcataattaacagcttaaatggcttaaaccggtgatgagaattaattctcatcaccggttttttgtcgttttgcagcggatgcttaattatcataaataaagctttactaacagccagacattggctaaagtaagaattattagagaatgtaattctgattattaaagggtgggatgacagtgacaaccgatgagatgattattgcgacttgcttgaaggctggtaaaatcatggtcgagaatggttcggagatttcgcgagtagatgatacgatgatgcggattgctcagaatgcgggggttgttgctgccaatacctacgtgacgattacgggtgtcatgatgtcgattcaaggacgtaatgcaacgcagattgccgcggttaaccagcgaacgatcgatcttgaaaaagtggcacaggtcaatcagttatcccgtgaatttgcggctacgaccattgatttaccaactttatatcaacggcttaatcagttagatgcagcttcgcgctcatttccgttgtggttgcagttggtcggtgcagccttagtcagtggccccttgatgattatgtttcgtcaggaaattgttaatacgtggccaactgttattattggaacattaggttacttggtcttttatctgcttaaccggtatcttaaaattaaatttttgagcgagttaacggcggcacttctaattgggtttggcgcggaatgggtgtgtcagattgggtggggaaccaatgtcaatgatattattatcgggtcgttgatgccactagtgcccggagtgccattaacaaacgccgtacgagatactctggctggtaatttcgtcagtgggcctgcacgtggcgtggaagcgatgctgagtgcggcagcactaggctttgggatcgccgttgtcattacattattttaagtacgggcactagcctgggtattcggagggatcatgatgggcacaattggacaattagtgctggcttacattgcggtactggggtttggcctgattattaatattccacatcaagcgttaaacgttgcgggctggattggtaccctaacgtggggtggctatttgattgttcaggcttttgatggtggggtcgtcttaggaagcttaattggctcggtcggtattggcgtcctcagcagcttagcagctcgctacaagaagatgcccgctattatcttcaatattccgagtttagtttcattcgtgcccggcagtcaggcttatcagatggtgcgtaactttgcgctgggtaattatcgtgaggcggtttcattcacgttgcaagtgattatgattactggtgcgattgcattgggattcttattagctgaattactcaaccggcttatcgcattttgtattcgccagtggcggttgcaccgattggagtcgtaacctaactgttggctgattagttgtgaatcgtgaacaaagtttgcggacgctaagactaagcgccataaataaattccgccaaaagtggtgggttagtgcgactaatttgccgtgtgccagcgttctgaatagttacgcgcttagattagttattacgactcgcattcaatacagaaaaaggcgccaactgaactgctctactaagcagttcagttggcgcctttttaattagttagctgagacatcgcaacaagtagtcacgactcttatcatcaaatcagatggttagttttggttagcaaatttttcgccggttgtcgcagcctttaaattaagggacttacgtaagacgttcgtgacccgttgcttttcagattgcgaaacaacttcgaaagactgaccatcaatcatcttaccagtaccctgggcgtgatcagagacgatattcttggttgcactacggtaattagtgacgatactagttaaattaccgaatgttaagtcagtccgtgtttgtttagcaagtgaatttaagaaatcttgtttaagcaagttggaagcactggcgctttctccgataatggcggtaattaattgccgttgccgctgttgccgaccatagtcgccgagtggatcatcataacgcatccgggagtaagccaaggctttggcaccattcatatgttctttttggcccttagtaaaggtgtagccttcgtaggtaaatgtccgaattggagtaatgtcaacgccaccgatttcatccacaacttttttcatgccacccatgttgatcagggcgtaatagtcgattggaacgttcaaccatttttgaacggtcttgatggtcgttccggcactaccataagcgtaggcagcgtttaacttagtcgggaagtcctgttcgaagccggagacagctacttcagaatcacgtggtaaactcatcagggtcgttgtcttagtcttggggttgatcgttgctaagatgatcgtatcggtccggcctttatagttccgcccgagggccccggtatcagttccgagtaataggatcgagacgggtttcttaccattcaatacggcgctcgtattccgactctttttaataccactactcttgaagacggtgtcggccgcatttttggcgttaaaataagttcgcgcggcaaaggccccggtcccaactaataacacggcaataatgattaaaacggtattgcgaacggggtgcttcttcttgggcccgttgccgttcccctgtgaattgtttccttgtgatttctcacgatgcatttctgagcgacttggcatgtcttccatgaactcttcctccaatggtaatagttattcatagtttagcattttttcgggtcagcgggaactgaatccacgtaagatttagcttgattaccgatgactgtcagataaatcataacctttttgttaataaaacgtgattaaaatgggaattctttgtttttttttaaggttccctgagagatattaatgattcgttcagtcgattaatagactatggtataattttgttaattttaatattaaatgggggttcttgttttgatgatcgataagtcgcgtagtcggccgatcaagtttgtcattggggtaattttatttgcctacttaagctattttattagtgacggcgcggttggtattgatttactagatgtggccttaacgtcgctggtccaaattagtaatagcggtatttggacggtattttataaggtgattgcttggttggcgtcacccggaatggacattttgtggatcgtcatcctggcgtttctaatgtacggatttaaatataagattcaagcgttctggacgctagcatatatggttggtgcaatggcgttaggctttattgtcaagcacatcatcggccgagcgcgaccaattggtcatttagcgcaggataccggatatagttatcccagtggtcacgttttaggaacctttgtgttggtcagcgtgattatcatgttgattgttcctgagttgccaagttatcgaatggcaatgatcgtcaagtgggtgagtgtcgtatggttagtattggtcattttctcacgtatttacttgaatgcacattatccaactgatacgattggggccgtgttgttggcatggtcttggagtcaaatcatgcaatggttctacgttttctgggcaccaggattattgaaatggccgttgttttatcgctcatatttataaagacaattaacaaacttaaactaatctattatttagcaggcaaccgtgtcactaaataatagactcaaaataaaaaattgtttgctttaatcgacactactcggctgattgcgagaaattgatcgaagcaaacgattttttgtttacagctataaaatattaactagcaacgactggtaatgaactaacgattatcagctagccattcaagtgctaacgttaaccagtgggcgacgtgcggctgattggcgtctggtttccatgctgtttgtgcattcgcaagggctagtccgtgtgggccatgtttaaagacgtgtagttcataaggaatcttagcagttgctaacgcagtcgcgtaggcaagcgtattggttgctggaacaattgggtcgtcagccgttgtccagataaaagtcggctgattatctgaattgacgtgttggtcagcggccagttcgttcggcgttggtgtccaggtagccaaggtcgcgtcatccttggggaaacctagcaatggactgatgactggatagccgagtaccacgttattcggctttaacatggcgggcgttacgtttaattcagttgccacgcgggtcgcccagtaatcgttatacagtgccacaatgtgaccacccacgctaaaaccagcaggcgtgatctgttgcggatcaatatgccattcggccgcgtgttgacgaagcaagttgactgctcgtcctaaatctaatacgggtgctaatccgagtggttgttgatcagtgagtagcgtatattccaagtaaaaggcctggtaaccgtgcccagcgaaagccatggcgagactctctgcttgcgccactggaatatgcgtgtatgagccgcccggaacgataataatggcgggtaagttcgtttggtgtgcgttcgtatccggttgatgcaaataaccggtcaattgcgcgcacgtcgctgttaatttttgcttaataacttgcatgcaatcacctcaatttgatatggttaacataactattataacgcaagtcaggtggaacagatatgggcatggttacggttacaactcggaatgagcaactcgagttacggccatttacgttggcagatacagaggattattatgacttagttcgtgatccgtcaattgcggcatcggcgggctttacgccagcgcacagcttagtggaagccgaattcttattgaaacagcaagcgaagttaccacagatttttgcgattgaactaacagcgatccaccgcgtgattggcagtgtggggttgtatgagcgcatgacgaatacgggcgaaccagcaactttagagatggatctcgggtatatgttgaacgctcgatattgggggcggggcattatgacggcagcagttgcacgtattttacgatacgggtttgaaacgcttcatttgcggcggatcacagccagttgtctagctaataatccggcgtctaagcgaatcttagagcatgctaattttcgacagtatgatgctgttcgccatccagattacgccccgtttggcgctggtcagacggagttattctttgattgtgtggaattaaacctttaggaggtgagttaatgcaactcgcaaaatcgtttgaacaggccgcctgcgtgttggtattgttggctacacagcaaccggagattccgttgactgcggatgtcttgcacgagcgaattggtggttccgcttcgtatattcgtaagattattcgtaaattagtagtggcaggactggtcacgtccaccagtggaaataacgggggtgtccacttggcacgctcacctgaggacatttcaattacagatgtggtcgcggccatcgaggggacgttgcagacctttccgaattatggttattttgaccgagtatttaaggacgttgaaccggtcgctcatgaagggacgaaagtggtcaacgggattttttcgcgagcggatcaattatggttagattttttagaccagcaaaaactggcgacgttgatcaaggaattattagttgttactcaaatcccagtgttggattggacgaattactcagatgataaaatggcccaattaaatgcgttgcttagtcggatgcgggcacataagtgagacgtcgtacaaactcgataaaaattgggagcggtttcgcttggtaaaccaatattgacgcgcttttgccaatcggggatcattttcaaaatgatacactttatttcacaaggctgaaaatactgttattaaagcgttttttatggtattctaacaatgaatttcacaagatagaggggaacaacatgccagataagaaatattacggggccgatgcgatcgtcgacagccttgtaaaccacgacgttaagtacgtattcgggattccaggcgctaagatcgatcgggtctttgagcgcttggagcacccagtcaacccgaaaagtccgcggttgatcgtgacgcggcatgaacagaatgccgcgtttatcgctgccggaatcggtcggattactgggaaacctggtgtagtgatgacaacatctggccccggtgccagcaatttagccacggggctcgtaacggcaactgctgaaggtgacccagtcttggcaatttctggtcaagttcagcgtgctgacttgttacggttgacccaccaaagtatgaataacgcggcactatttaagccgattacaaagtacagtgcggaagttcaagaaccggaaaacatttcggaagtgctcgcaaacgcctaccaagaagccacagctgctaagcagggcgccagctttgttagtgtgccacaagatgtcactgattcgattgtacgcacacctgttattacaccaatccaggcacctaagttaggacctgctagcccggtcgaagccacgttattagcacaaaaaatcaaagcagctaagttgccggtcttgctagttgggatgcgggcttcttcaccagaagtgacgaaagcaattcggaacttggtggctgctgctaatctaccagttgtcgagactttccaagcggcaggcgtgatctcacgtgatttggaagccaaccatttcttcggtcgggtcgggttattccgtaaccaaccaggggatatgttactaaagaagtccgacttagtgattgcggtcggttatgacccgattgaatatgaaccccgcaactggaatgcggaaggcaaatcccgtatcgtggttatcgatgcaatgcgcgctgaaattgatcataatttccaaccggaaaccgaattgatcggtgatattgcccagacgttagactttttgttgccgtacatgaagggctatgatattagcgatagtgcgcgagcttacttgggtgaattacaagaacggcttcagacgcgtgatttcgtacctaatattgataagcagtccaagttaaatcatccgctgtcagtaattgcagccttacaacaacgggtcagtgatgacatgacagtgacggtcgatgtcggcagtcattatatctggatggcgcgtcactttcggagctatgaaccacggcacttgttgttcagtaatgggatgcaaacgctaggggtggccttaccttgggcaatcgcagcggctttggttcgtccagatacgcaaatcgtatctgtctctggtgatggtggtttcctattttccgcccaagagctggaaacggctgttcgactgaagcaaaatatcgttcatttgatctggaatgatggcacctacgatatggttaaattccaagaagaaatgaagtatggcgaggatgcagcggtccactttggcccagttgattttgtgaagtatgctgaaagctttggtgcgactggcttgcgggtaaaccaacctgctgatttggaaaaagtgcttgatcaggcctttgccacggatggtccagttgtggtggatattccaattgattattctgataacaaggcgttaggtaagacaatgttaccagaccagttttattaaaattaacattagtgaccggttgtcaaaagatggtcggtcagatataatggttgagtatatcgaaagaagaggatgcggttaacaatagtagccggctggaagtgggtcaccacttatgaaggtcagtgaacggggcaaccgccgaaatcgatggatcagtgaccgattcatccgttgggccttggttgaataaatcaaggactgtcgcagctagaatagttgcggggcgctatcgacgatgaaatcagcaattatgtcaatcaatctgattaaagtctttttgcgcacgttatcgtgaggcaaagaggctttttattttgattgtgctaacctgaatcggtgtgaacacttttagatataaatcgatttttggaggttctgcaatggcagaaaaacaacatcaggaagtgcatcgttccttacagacgcggcatttatccatgattgcattaggtggtagtatcgggaccgggctgtttgtcgcgtccggttcggcaatttcaacggctgggccggggggagcattactggcctacgttggtattggagtgatggtttactttttaatgactagtctgggcgaaatggcaacttatttgcccgtttcaggttcgttttccacgtatgccacgaagtttgttgacccggcacttgggtttgcgatgggctggaattactggttcaactgggcaatcacgttagcggtcgatattagtacggcggcgattgtcatgcagttctggttgccatccgtgccggggtgggtttttagtctgattgcgctcgtcttgatttttacgatcaacgcgctgtcagtccggtcgtttggagaaactgagtactggctttcgctaattaaagtggtgaccgtgctcgtattcttggttatcggtgtcttgacgatcgtgggaatcatgggcggtcatgccactggcctcagtaactttacctataaaaaggcaccatttgtcggtggaattccaacgattttgagtgtcttcgtggtcgctggtttttcgtttcaaggaaccgaattaattgggatcacggccggggagtcagcaacaccggagaaaagtattccggcggctattaaacaagttttctggcgtattttgttattttacattttagccattttcgtgattgcggcgattattccttatacgtcgaaagatcttctagggtcatcagcgagcgatattgccatcagtccgttcacgttagtctttaaacgggctgggttggcggctgcggccagtgtgatgaacgcagtgatcttgacgtccgtattgtcagctgctaattcggggatgtacgcctcgacacggatgttatattctttgtcattacagggttatgcccccaagacatttggtcgggtcaatcgtcgtgggattccaatcatggcattattaggaacgacggtgattggattactcacgttcttgtcgagtctattcggtgaacggatttatattttcctcgtttcggccagtgggttaacgggctttatcgcttggctaggaatcgctatttcgcatctgcgtttccgtcgcgcgtttgttaagcaggggcatcaattgagtgaattgcggtaccatgccaagtggttcccatttggcccgtggttcgcctttatcttgtgtgtcgtggtcattattggtcaagacttacattcatttgcaacgcttgattggcaggctattggggtgacctatatgagcatcccgttattcatcatcttgtatgtctattataagattcgctatcatactaagatgattccgctagacaaggttgatttgacacgcaaacgacaccatcaagattaagcacgcactttgatagtttgattaaatgcggttgacactgggtcaatcgcattttttgacggcgagagttggacctgtcaactcaaggcgcggtcgtatttttaggtgtcctgatttatgctgataacactgctcgcaacagatggtcacggcggatcgttatgagtgggggcttgcacgattgtaatgatagcaagcggcaaattgagggtgcgctaatctgatatctatggtaatttgatagaatgagaatatggaatcattaaaaattcgcaaacttatccttaagaataggctagtcggctatgactatgctaagctgaaatgagaaaggcagcgagagagatgttaaagagaaatttgttaagaggtctagcattagtgtcattagcaggtgtcctggctggctgtggtgctagccagttgacgtctaaagcgactagtagttctacgagtgctaagtcgacgaagacgcagaccaagcggcaacgactgattagtgccttaccgaaaggcgttaaatcgaccgatagcgacttagtggtcgtcaataagtggcataagcgcgctgagatgacatttaataagtcgagcgtggatggtattgaagtccgtagttctatcgtcaaaccattggaagcctttctagcgggggcaaaaaaagccggctatccagcaacaatcgtgtctgggtatcgttcagtcgcttatcaaaaagaggtttgggatcagtcgattcaaacctatgagaatcaaggaaaatcagccaaggaagccttaaagctgactaaagaatatgtcgcagttcctagtggtagtgagcatgaaactggtctcgcagcagatatcatgaacacgcactggtacagcactcatggtaatcaattattgtcatcatccgacaagaacaagggtcagcagtggttgattaatcacgcggcggactatggatttgtgttgcgctttactaaagatggtaagcagtcgactgggattgactatgaatcttggcatttccgttacgttggtaaggcgagtgcggaattcatgactaagcacaatttgactctcgaacagtacgtcagtttgctgcaagctcgagaaaaggcggccaagtaataagctagccgtattattgatggccccaattaataccatttatggcgtacgttaggaattagctagcgtgcgcttttaaattgtcttcggtttagcaatgtgggttcgtctcaactgagtattatttggtcacgacagattatgctggtcagaggccgcactcaaagctgaagtgccaccagcgccggcttgggtagtaacccagtgtgtgttagtgagttgcttggatcgctgactagtgcgtcgcagttgtggctggtgcgaagttttttactgaattgactcaccagatattgcattttaagacgtgggtgcgtacaatatgtagtgttgcttttagagataatcaaaattttgacgtgattaaaaggagagacgccccatgcttgtaatgtcaggaacaatcggtgccggcaagacgagtttaacgcagttagtggctaaccactttggttctaaagcgttttacgagtcagttgatgataatcccattttgccgttattttataaggatcctaagaagtacgccttcttattacaaatctattttttaaataaacggttagatagtattaaatcagcttttgctaacgatctggacgtcttagaccggtcgatttttgaagattcattattatttcatttgaatggtgatcttggccgggcgacgaataccgaagttgacatttatgattcattattagataacatgatgcaggaattgccagaagcgtctcatcaaaagagtcctgatttacttattcatatcaatatttcttttgatacgatgctcaaacgaatccaaaagcggggccgttcttacgaacaaattgatcaagatcctgatttatataaatattatcagactttgaatgaacgctatgacgactggtacgctaattatgatcatagcccgaagatgcagatcgacggggatcagctggactttgtcgccgatgcggatgcgcgtaaggaagtcattcggttgatcgacgaaaaagtggctagtttaggctagttgcctttttagaatcaatgttttatagtagacagtgaatattaaacacggcgcgtttttaagtagacgttcagagaaccggtgggtggtgtgaatcggtagtcgaaactccggcgcgacaatgtgggcaggtaatactgcacggcacggccgttatccgtttaagggtgggattaatcatgatcctgaacttgggtggtaccgcgaatcgcagtctcttcgtcccaattgggaggagagactgtttttatttacgattaaaagtgaaaaggagacgtcgttatgttagatgttaaaatgattcgtcaaaatccagattttgtaaaagaacagcttggtcatcggggtgttgctgcgagtgacatcgatgatttattggccgctgatgaaaagcgtcgtgaattgatcgccaagagcgaacaattgaagtcgacgcgtaaccaagtttcaggcgaaatttcacagaagaagcggaacaaggaagacgctagtgccgaaattgcagaaatgcaaaaagttagcgccgatgtgaagacgttggatgaagaacggcggacagttgatgcccaagttcaggatatggctgcacatttaccaaacatgccccatcccgacgtaccagttagcttgaaagaagaagatgccgttgaattacgtcgaatcgggacaccacggcattttgactttacgccgaaagcacattgggatatcggtgaagatttaggcatcttagactttgagcgcggtgctaaggtttctggtagtcgtttcttatactacgtgggcgatggtgctaaactggaacgcgccgtttacaactttttcttagaccagcacgaagctgaagggtatacggaagttttgccgccatacatggtcactgatgaatctatgtacggtaccggccaatttcctaagttcaaggaagacgctttccggattacgacgcaagatttgacgttgattccaacggccgaggtgccattagtcaactattatcgtgatgaagttattcccgctgaaaaattaccagtttactttacggccttatcaccagccttccgtgaagaagctggtagtgctggtcgtgatacgaaaggcttgattcgcttacaccaattcaataaggttgaaatggttaagttcacgaaaccagaagattcatgggatgaattagagaagttgaccaacaatgccgaatcattgctaaagaaacttgggttaccatatcacgttattacgttaacgactggtgacatgagcttcacagctgccatgacacatgacttggaagtttggttcccagaacaagacaagtaccgggaaatctcgagttgttcaaattgtactgatttccaagctcggcgggcgcacattcaatatcgcgatgacgatggcaaattgcaattcgttcatactttgaacgggagtggcttagctgtcggtcggaccgttgcagctattttggaaaactatcaaaatgaagatgggacggttacgattccagatgtattagttccatatatgcacggtaagacgaagattgaaaaacaaggttaattgagatgaagttagcgaactcgcagtgatgcgagttcgctttttttgcataattaatgagtattaaagggaactgtcgattttaaaatgtgagtggaaataacggccgagttgactaaataattgcgggacgggcagaatgtcgggagaacatttcaggcgcaaaagggcgaaaaagctgggtttactgaaatttattcacctttttttgaaaatagggtttgctattttcggctaccgtgctataatatttcttgtcggaaaaatataacttgtttatccagtaaaaagtatatttatccatttatttgaaaaaagttgttgacaagtattcaacatgatgataaagttaaatagttgtcaaggcataccagtaagaactgtttgaaccggcaacaaggcatgattaacatcatgcgggtgtggcggaactggcagacgcgctagatttaggttctagtgtcttacgacgtgggggttcgagtcccttcacccgcacatgccgacttagctcagttggcagagcatctcactagtaatgaggaggtcggaggttcgaatcctctagtcggcatttacaatttaatagttttattatgcggaagtagttcagtggtagaacatcaccttgccatggtgggggtcgcgggttcgaatcccgtcttccgcttttaatttgccggggtggcggaattggcagacgcacaggacttaaaatcctgcggttagtgataaccgtaccggttcgatcccggtcctcggcattttaaataagcacccatagcgcaattggatagagtgtctgactacgaatcagaaggttgtaggttcgactcctactgggtgcattagtatcgggaaatagctcagcttggtagagcacctggtttgggaccagggggtcgcaggttcgaatcctgttttcccgatcgtttaacacagtcttagttaagtgctaaggctttttatttaattttctcgggaagtagctcagcttggtagagcactacgttcgggacgtaggggtcgcaggttcaaatcctgttttcccgattacggttaaaccaactaatccagtcatttggctggattttttttatggccttttttgtaagcaggggtgtttcaacggtcaggggacacttttgcgacgttactcactaagtcagccatgtgaagaatacggtggttgtgactcataatcccgacaaggcaacagccactgttagtcatgagctcggagaaattagtctcggaactgctgttcatcgttgtgataccagtgcccatcgcctgcaatgaggagtgactcaacttgacatattttaaataggtagttcaatgaatatggagacctaataatttaatcattatgaggttctaaacggttgaatcaattgaaagcaaacgtttggcgtgctatgctgtaacaaccgttaagcacatgctagtccgcggtttgggtgaaattctttgcttttttccattatcctcgtataataatagtcaatattagtcaaagataatgaaaagggtgaagcacatgcaaagtcaaaatatctcggatattattgaaaagtatttaaaaagtattttggcggactcggagcatgttgaaattcgacggtcagaaattgccgaccttttcaacgtggtaccctcacagattaattatgtgattaagacccggtttacgatccaaaatggttacttagttgaaagtaaacgtggcggtggtggttatattcgcattgagaaggttaatttggtcgatgatgctgatgtgttggacgccctcatacaggtgatcggcgattcaatcacacaacgagatgcttatgcggtcgtccaaagtttatacgaggacgacgtcttaaatcgtcgagaagcgcaattgattttagtggcgattgaccacgagacgttaggattaacggaccgggatttagaaaacagtctgcgggcccggataattatcggaatcttgaaccacttgcgttacgaaagctaaagaaagcgaggaatcgcaatggataacttatttacacctagtgccaaaagtgtgctggtactggcacaggaacaggccaaatatttcaagcatcaggcagttggtacggagcatttgctattagcattggccatcgaaaagaatggaattgctaataaggtgctacaacaatatgccgttagtgaagatgacattcgtgaagaaatcgaacggttcactggctatgggacgttgagcaatgttggcaaggatacttacttgccatattcaccaaaggccaaagaaattttgtccgttgccggtgatgaagcaaaacggctcggtgccaacaagattggaacggaacatttgttgttagcgatgctctctgatgaaagtatcctttcctcgcgaattttaatgaatttaaacttagatctaggtcagacgcgtaaagtcgttcttcgcaagctaggtgtcagtgacgccatgagtaagcgcaagggtaacgcggctaatcgcggtggcaagaagactgaaggaacgccaaccttggattctctggcgcgcgatttgacccaattagctagtgaacaagaaatggacccggtagtaggtcgttccaaggaagtcaaacgggtcattcagatcctgtcacggcggacgaagaataatccggtcttgattggtgaacctggggttgggaagactgcaatcgccgaaggtctagcccaaaagatcgtggccggtgatgtgccaactgatatggcagataagcgcttgatgatgctcgatatgggatcattagtcgctgggacaaagtatcgtggtgaattcgaagaccgcctgaaaaaagtgattgatgaaatttacaacgatggccatgtgatcttatttatcgatgaattgcataccttgattggtgccggtggtgctgaaggggctattgatgcctctaatattctgaaacccgcacttgcacgaggggaactccaaacgattggggcaaccactttaaatgagtatcaaaagtacattgaatctgacgctgcgttggaacggcgttttgcaacggtcatggtcaatgaaccgaccgaagacgaagccgttgaaatcttagatggactacggccacgctatgaagaacatcatcgggttacgattacggatgaagctgttgatcaagcagtcaagctatccagccggtatatcagtgatcgtttcttgcctgataaggccattgacttgatggatgaggcggcagctaaagtccgcatcgatcagatggatcaaccaacgaagctatccaagaaccaggacaagttagcgcaactgcgtgaggataaggaaacagcgatcgaagcacaagattttgaacaggccgctgatattcgtaagcaggagatgcaactgaagcaacgcctagatcgaatcgaagctgaccaagacgccgaagtgactgagggggcaacaccacactatgatttacaagtcacaggtgaggatattgctcaggtcgttgccgaatggaccggggttccgttaacgcaattgcaaaaatctgaaagtgaacgcttagttaacttggaaaagattttgcatgaacgggttgttggacagccagaagccgtatccgcagtggctcgtgctattcgccgtgcgcgcagcgggttgaaagatccgagtcggccaattggttcctttatgttcttaggaccaactggggttggtaagacggagctagcaaaagccttggcagcagcgatgttcgggtctgaagataatatgattcggatcgacatgtctgaatacatggaacgctattcgactagtcgtttgattggctcggcacctggttacgttggttatgacgagggcggtcagctgacagagaaggttcgccagaaaccatactcggtcgtgctatttgatgaagttgaaaaagctcatccggacgtctttaacattttgttacaagttttggatgacggctacttgacggattctaagggtcggaaggtagacttcagaaatacgattctgattatgacgtcgaaccttggggcaaccacacttcgtgatgaaaaatcagttggttttggtgcaactgataaggccaatgactacaatgcggttgctgcgacgattcgagcaacgttaaaacagacgttccgcccagaattcttaaaccggatcgacgaaacaatcgtcttccattcattgaataaggaagaattacacgaaatcgttaagttgatgtcacaagaaattgttgatcgagtggcccaacaaggtatcaagatcaaaatcactccggctgccattgacgtggttgcgaaggctggctttgaccctgagtacggagcacgaccaattcgacgggcattacagactgaaatcgaagatcggttgagtgaagaattattgaccggcgcgatcaaggtcgatgaccaagttacgattggtgctagcaagggtaccattacaattaatattaaaaaccagcctaaggcagatggtcgttcgaccgtttcctcaaagtaggcgcgattaaattaaagatgacgcttgaagtggtagtccacttcaggcgtcatcttttaggttcaatcggtattaagatgctacccactgaagtgaactgtaggatctgaggctggtggttcggtgctgattggtgtaaattataataggaaataaagtcaagaaagaagatgataacatggcgacacgagccgaacagatggcgaagacgcaccaggcgattttagacacagcccgggaactgtttttaagaaatgggtatgatgcgacaagtacgcgcgacattgcgaatgcgattggcattacgcagcccgcgctttatcaccattttaaagataaagaggtcatctttctggctgtcattacgacggtcggtgcggaaattaaggctggcattgaagcgattcaagtccgtgcggattggtctccgttggatcaattaacagaagtctcgctattactaacgcataagcatccggctgatgtcttcacgttaattcattccagtttcaaagcattaacgcatgaacatattcgcgagttgggcggcatatttgttactgattatgtgaagccgattcaaaccgtttttgagcaacctgacatgcaactacatgtgggggtcacaccacagatggcgacgaatttctatatcaccagcttgagtccattgtttaacagttttcatcaaatcggtgatcctcatgctgacgagcggacccgcgttcaaactcttttaaagatgatcttatacggggttgcgagtgaaccagaaaactaatggcggcagagaagtctactagttgacaactaacgttattcgatgtatattataacttgtctgtaaccgtgaactcgagcgaacgcgcaatctattgtctgtgcggctcgttaatataaatccaaaaatagtcaacttaagcgactatttttggtttttttatgcctaaaattcggtcaaaaacgcatttgtaacacaaatgtaatatttgaccggaggtggcgggttccggaataataagaaggggtgaacaacttggccggacatttagtaaaatacggtaaacaccgtacccgtagaagttatgcacgtatcaaggaagttcttgatttgcctaacttgatcgaaatccagaccgattcttaccaatggttcttggatgaaggtctccgggaaatgtttgaagatattatgccgatcgacgatttcgcaggaaaactttcacttgaatttgtcgactatcaattattagaaccaaagtacaccgtcgaagaagctcgtgaacatgatgccaactactcggcaccattgcacgttaccctacgtttaactaaccatgaaactggtgaaattaagtcgcaagacgtattcttcggtgattttccattaatgactgaacaagggacgtttattatcaacggtgccgaacgggtcattgtttcacaattggttcgttcacccggcgtttacttcaatgaagaattagataaaaatgggcgtcctagctacggcacaacggttattcctaaccggggtgcttggttagaacttgaaactgacgccaagaatgtctcatacgtacggatcgatcgtacgcggaagattccattgacggaattagtccgggccttaggctatggttctgacgatgacattattgacatgttgggtgaaactgacagtttgatgttgacgttggaaaaggacgttcataagaacaccgacgactcccgggttgaagaatccttaaaagatatctacgaacggctacgtcctggtgaacctaagacggctgacagttcgcggagcctattgactgctcggttcttcgatccaaaacggtatgacttcgcaccagttggtcgctacaaggttaacaagaagttaagcatgaagacgcgcttaatggaccaaacgttagctgagacattagctgatcctgatactggtgaagttattgcgcaaaaggatacggtcattgacaagaatgtcatggctaaactatccccatacttggaacgtgacgactttaagacggttacttacacaccatctgacgaagccgttgttacgaatccaatggtcttacaagttgttaaggtttattcacaaaacgaccctgaaaaggttgtgaacgtgattggtaatggcaacattgatttgaagttcaagcacattgtgcctgctgatatcattgcttccattaattacttcttcaacttgcaagaaggtcttggctcaaccgatgatattgatcacttgggtaaccggcggattcgttccgtgggtgaattattgcaaaaccaattccggattgggttatcccggatggaacgggttgtgcgtgaacggatgtcaattcaagatgctgcgacggtaacgccacaacaattgattaacattcgcccagtggttgcttcaattaaggaattctttgggtcatcacaattgtcacaattcatggaccaaaccaaccccttaggtgaattaacgcataagcggcgtttatcagccttaggacctggtggtttgactcgtgatcgggccggatatgaagttcgtgacgtgcactatacccactacggtcggatgtgcccaatcgaaacgcctgaaggccctaacattggtttgatcaacagtttgtcttcttatgcgaaggtcaaccgttacggcttcatcgaaacgccataccggcgtgtcgattggacaacgcataaggttaccgataagatcgactacttagcagccgatgaagaagaccaatttgtgattgcacaagccaactctccattgaatgatgatggttctttcgttgaagacactgttttagctcgtaacaaggaagaaaacttggaaacgccaatcgaaaatgtcgattacatggacgtttcgcctaaacaagtggttgccgtcgcaacggcatgtattcctttcttggaaaacgatgactctaaccgtgctttgatgggtgccaacatgcaacgacaagcggtgccgttacttgatcctcacgcgccattaattgggactgggattgaatataaagctgcacatgactcagggattgccttgatttgtcgtcatgaaggaacggttgaatacgttgatgctcgcgaagttcgcgttcgtcgcgatgatggttcattagacacttacaagttaatgaaattccgtcgttctaacggtggtaagaactataaccaacggccaatcgttaaagttggcgatcacgttgataacgatgaagtcttagccgatggtccagcaatggaaggtggggaattagcccttgggcaaaacccattagttgctttcatgacttggaatggttataacttcgaagatgccatcattattaatgaacgtttagtccgtgaagacgtctacacgtcaattcatattgaagaatatgaatcagaagcacgtgacaccaagcttggacctgaagaaatgactcgtgaaattcctaacgtcggggaagatgcattgaagaaccttgacgaagacgggattatccggattggggccgaagttaaagacggtgacatcttggttggtaaggtaacgcctaaaggggttacggaattgtcagctgaagaacggcttctccatgcgatctttggtgaaaaggcgcgtgaagttcgggatacgtcactccgggttcctcatggtggcggcggtatcatccaggacgttaagatcttcactcgtgaaaacggtgatgaattatctcctggcgttaacatgatggttcgggtctacatcgcacaaaagcggaagatccaagttggtgacaagatggccggtcggcatggtaacaaagggacggtttcaatcgtggttcctgaagaagacatgccgtacatgcctgatgggacaccaatcgatatcatgttaagcccaatgggtgtgccttctcgtatgaatatcgggcaagtgctcgaattgcatttggggatggctgctcggaagttaggaattcacatggcaacgcctgtctttgatggtgctcaagatacagatatttgggaagccattcgtgaagctggggttgattcagatgccaagtcgatcgtctatgatggtcggactggtgaaccgttcgataagcgggtcgctgttggggtcatgcactacatgaagcttagtcacatggttgacgataagatccatgctcgttcaatcggaccttactctttggttacgcaacaaccacttggtgggaaagcgcaatttgggggccaacgtttcggtgaaatggaagtttgggccttggaagcttatggtgcagcttataccttgcaggaaatcttgacttacaagtccgatgacgttgttggtcgggttaagacctatgaagcaatcgttaagggcgaaccaattccaaagcctggcgtaccggaatcattccgcgtgttggttaaggaattgcaagcactcggtcttgacatgaaagtcttagattctgaagacaaagaaatcgaattgcgggacatggatgatgatgacgatgaagttgtcaatgtcgatgcactcagcaagtttaaacaacaacaagatgagaaggctgcggacaaggccacaaaagctgacgccgctaagccttctgaaacaaccaacgctcagcaagataatcaataaaaagggaggtcggtcctttgatcgatgtcaacaagtttgaaagcatgcaaatcggtctggcatccccagacaagattcgcagctggtcatatggcgaagtcaaaaagccagaaaccattaactaccggacattgaaacctgaaaaagacggtctgtttgacgaacggatttttggtcctactaaggattgggaatgtgcttgtggtaaatacaaacggattcgttataagggtattgtctgtgaccgttgtggggtcgaagtgactcgtagtaaagtccgtcgtgaacggatgggtcatatcgaacttgccgcaccagttactcacatctggtactttaagggaattcctagccggatgggcttagtcttagacatgagtccccgggcacttgaagaaatcatttacttcgcttcatacgtcgttatcgaatctggtaatacgccacttgaaaagaagcaattactttctgaacgtgaataccgtgagaagaaggctcaatatggtaacgaatttgaagctgccatgggtgccgaagccatcaaacggttattgaataacgtggatcttgaaaaagaagcacgtgatttaaaggaaactctgaaggatgcttctggtcagaagcggacccgggccgttcggcggcttgatatcatcgaagctttcgtgacatctggtaacgaaccagcttggatggtaatggacgcaattccggttattcccccggacttacggccaatggttcaattggaaggtggtcgttttgccacctctgacttgaacgacttgtaccggcgggttatcaaccgtaataaccggttgaaacgcttgttggacttaaatgcacctgggattatcgtgcaaaacgaaaagcggatgttgcaagaagccgttgatgcgttgatcgataatggtcgtcgtggccgtcccgttgctggtcctggtaaccggccattgaagtctctttcacacatgttgaaagggaagcaagggcggttccgtcaaaacttacttggtaagcgggttgactattctggtcgttcggttatcgatgttgggcctttcttgaagatgaaccaaatgggtttaccacgtcaaatggcgttggaattgttcaaaccgtttatcatgaaggaattggttaaacgtgaattagcttctaacatcaagaatgctaagcgaaagatcgaacatgctgatgacgatgtctggggtgtgttggaagacgttatcaaggaacatcctgttctcttgaaccgcgcccctacgcttcaccgtttagggattcaagctttcgaacccgtcttggttagtggtaaagcgatgcggctccatccattggcttgtgaagcttacaacgccgatttcgatggggaccaaatggctattcacgtcccactttcagatgaagcccaagctgaagcacggctcttaatgttagctgcccaccatattttggcgcctaaggacgggaaacccgttgttacgccatctcaagatatggttatcggtaactactacttgacgactgaagaaatcggtcgtgaaggcgaaggtatgatcttcaaggacttgaatgaagctcaaaaggcttaccaatcaggttatgtacatttgcatagccgggtcggcattcaggtctcatcaatgcctgacaagccattcacggacgatcagaagcaagcagtcttagtcacgacggttggtaaggcaatcttcaacaacattttgcctggcaagttcccttacttgaacgaaccaactaacgataacttgattgctggtacaccggacaagtatttcttgaagcctggtgaagatattcatcaattcttggatgcccaggaaatcattccaccattcaagaagggcttcttggccgacattatcgctgaagtttacaagcaatatcacgtgacagcaacgtcactcttgcttgaccggatgaaggacttaggttacaacatttcaactaagtctggtttgacggttggggttgccgatattactggtttgaaagaaaaaccagcaattatcgccgaagcccataaacaagttaatacgatttcgaaacagttccgtcgtggtttaattactgatgacgaacgttatgaacgggtcattggtgtctggaacgacgctaaggaccaaatccaacaaaaactgattgaaagtttcaacgcggataacccaatctttatgatgagtgattctggtgcgcgtggtaacatttcaaactttactcagttagctgggatgcgtggtttgatggctgcccctaacggtaagatcatggaattaccaatcctttcaaacttccgtgaaggtttgtctgtcttggaaatgttcatttcaacccacggtgctcgtaaagggatgaccgatacggcgcttaagactgccaactcaggttacttgactcggcgtctggttgatgtggctcaagatgttatcgttcgtgaaaaggattgtgggactgaccgtgggttgcggattcacgcaatcatggaaggtaacgaagtcatcgaaccgttgtatgaccggatcttaggtcgttacacgatgaagactgtctttgatcctgaaacgcatgatgaaattgttggtaacaacgtcttgatcgacgaagacttagctcataaaatcgttgatgctggtgtaacggaagttacgatccgttctgcatttacttgcaacactaagcatggggtttgtgaacattgctacggccgtaacatggctactggtgatgaagttgaagttggtgaagctgttgggacagttgccgcacagtctatcggtgaacccggtactcagctgaccatgcggaacttccataccggtggtgttgccggggacgatattacccaagggttgcctcgtgtgcaagaaattgtggaatcacggaatcctaaagggcgtgccgaaatctcagaagttactgggacggttgaattaattgaagaaaatccagcggaacggacgaaggaagttacggttaagggtgaaactgatacccggacttacacgttgccgttaacagcacggatggcggttagtgaaggcgactttattcaccgtggtgctgcgttgaacattgggtcgatcgatcctaagcaattgattcaagtacgtgatgtcttatcaactgaaaactacttgctccgtgaagttcaaaaggtttatcggatgcaaggggttgaaattggcgataagcacgttgaaatcatgattcggcaaatgttacggaaggttcgggtcatggatccgggcgataccgacgtcttgcctgggacgttaatggatattgcagacttcaaggacgagaactacaagaccttgattgctggtggtattcctgcaacgtcacggccagtcattcttgggattactaaagccgctcttgaaacgaatagtttcttgtcagctgcttcattccaggaaacgacacgggtcttaactgatgctgctattcgtggtaagaacgatccactgatcgggcttaaggaaaatgttatcattggtaagatcattcctgctgggactggtatgccggtttaccgtcatatcaaaccaaaggaagttggcaacgtggctgatggggtttactcaatcagcgaccttgaaaaacaaatgcaagaacaagatgctagcaagtaattgctaagtaactaaaaagggcggccattgtggtcgtcctttttgtatgcacgattgtaggtaggctatctggggcgttcggcgatgaaggttaatcttcagggggagaagactaactgagcctcactggaaaagttcaagtttgtgtaaacttgcttagttagtgtgtcctgcactgcgctccaggcatttctgctaattgctggactgccgtgccttaatactatattggtgaaacgtgttcagattggaatgagactttcggttagctaacactaatcctcagtctcagcccgtctaaaccggacactcttgcagtgctaagaaacgtcttccgctcgggatggtgttcgaatggtgggcacgtgcgtacgcaacttttgacggattagtcgttacttttttgagaccggaatcttatcgggtaactttcaggttaataatagaattgtgagctgtccccgatttctaaatcaccatattactactgagggtcagaacaactgatacaatattaacgcttgtttaaagttccaagtagtaaacaattcgacaacaaattgtaccaagttgagtggtcgttcatccgcacaggacgcgtactgactaacaagcaataatcgggcgtactagaatattgcaattatagctcgctatgcgagacccgtgagttgggtgaccatgatgaagctccaactgatgaagggcacgaatggtaagcgatggcgtggggcactgatgataaaaccaactaatgcggcaacggccgcaatggcgagacaggtcaacagtgtgtcggctggaatgatgaagacaagcatgagtagaacgtcaacatcgccgagaccaaaggtggcagttagccgggccagcaagtataacccgactagtaaggcaagtacgaggtagagactgatcgtcaggggtggccgttgttgccataagcccagtccggctggaagaagtaatgtcagcgggtagacttcaaaagtgagataatcagtaagactattgaaaatcaataccaagtaactaatcagcagtggcagcgtcaatgacaatgacgcactgctagaaactagtagaccaccacaaagtaattcaattagactggaacggaggctgataggagtgcgacaatcatagcactgcccccgttgaagcagaatgccgagtaatggtatcagttgccagaaccgtaattgatgtcgacagtgtggacaccgtgatcgttgagtgctaatgagtatgtgtccgctgctgatgcgttccgccatacaggtcacgaatgagcccagacagagaccaataataaaaagactgctggttaacatggaaggaccacctttcatcactagttacgcaatgtaaagcatcactattttttcaggacatttattgacaacttcggcatgtcatgatagtctagtaaaggtgctttttgcagacagattcctgtatcaggaatacagacatgctgactggtcggctaagcgcacaattaccatgctccaggcattcttttttactcaaaaaagaaccacctggatgtgtggacttaaaaaacagatatttggaaggaggacactttagaacatgccaacaattaatcaattaattcgcaaaggccgtaagtctaaagtatcaaaatcaaatgccccagcgttaaactttgggtataacagttacaagaaggttgcaactaataacccagcgccacaaaagcgtggggttgctactcgtgtcggtaccatgactcctaagaagcctaactcggctttacggaagtatgcccgtgtacgtttatctaacttaatcgaagttacagcttacattcctggtattggtcataacctccaagaacatagcgttgtcttaattcgtggtggtcgtgttaaggatttacctggtgttcgttaccatgttatccgtggtgctttggatactgctggtgtcgaagatcgtcgccaaagccgttccaagtatggtaccaagaagccaaagaaataataaggaggtaagttaaatgccaagaaaaggtgcacctgcaaaacgcgaagttttagcagatccaatgtataactctaaattagtaacgcgtttaattaaccacttaatgttagatggtaagcgcggtaccgcatcaactattttgtatgatgcttttgatcaaatcaaagaacaaactggtaacgatcctttggaagtcttcgaagaagctatgaagaacgttatgccagtacttgaagttaaggcccgccgtgttggtggttctaactaccaagttccaatcgaagttcgcccagatcgtaagacgactcttggccttcgttggatcgttcaatatgctcgctcacgtggcgaacacactatgtccgaccggttagctcgtgaaatcatggatgctgctaacaatactggtgcttcagttaagaagcgtgaagatactcaccggatggctgaagccaaccgtgccttcgcccattatcgttggtaatatttccgtgagatggttaaaggtcgcctttaactaatcacaaaaaggtgactattatatgcgcgcatatagtagtcattttttgaaataaactttatactgttaattccatttatattgagaggagtaacacattttctaatggctaatacacgagaattctcactcgataagacccgtaatattggtattatggcccatatcgatgctggtaagaccacgactactgaacggatcttgtactacactggtaaaattcacaaaattggtgaaacccatgatggtgcttcacaaatggactggatggcccaagaacaagaacgtgggatcaccattacctctgctgccacgactgcacagtggaagaaccaccgaattaacatcatcgataccccagggcacgttgacttcactgttgaagttgaacgttcacttcgggttttagatggtgcgatcgccgtattggatgcccaatcaggtgttgaacctcaaactgaaacagtttggcgtcaagcatcaacgtataacgttccccggatcgttttcgttaacaagatggacaagattggtgcggacttcaagtactctgtaagcacgatccatgatcgtttacaagctaacgcccacgccatccaattaccaattggtgccgaagataatttcgaaggggtcattgacttaatcgaaatgaaggctgacctttatgatgaagatcaacttggtactgaatgggatacggttgacgttcctgatgaatacaaagaagaagcccaagctgcacgtgatgacttaatcgaagccttagctgacatcgatgacggcatcatggaaaagtaccttggcggtgaagaaatcagcaaagaagaaattaaggctgctatccgtaaaggaacgttagcacttgaattcttcccagtattagctggttcagccttcaagaacaagggtgttcaaatgttaatggatgccgttgtggactacttaccatcaccacttgatgttaagccatacaaggctactgatcctgaaactgaagaagaagttgacttgattgccggtgatgataagccattcgctgccctagcatttaaggttgctactgacccattcgttggtcgtttgactttcatccgggtataccaaggtactttggaatctggttcatatgtcttgaacgccactaaggacaaacgtgaacgggttggtcgtttacttcaaatgcattctaaccaacggaaagaaatcccagaagttttctctggtgatatcgccgctgcaattggtttgaagaacacgactactggtgactcattgacttcgattgaccatccatatcacttggaatcaatggaattccctgacccagttatccaggttgccgttgaacctaagactaaggctgaccaagataagatgaacgttgccttacaaaagctttctgaagaagatcctactttcaaggctgaaactaaccctgaaactggtgaaactttgatcgccgggatgggtgaattgcatttggatatcatcgttgaccggatgcggcgtgaatttaatgttgaagccactgttggtgcgcctcaagtttcataccgtgaaacctttactaagagcactcaagttcaaggtaagtttgttcaccaatctggtggtaaaggtcaatatggggatgtttgggttgaatttacacctaacgaagaaggtaaaggcttcgaattcgaagatgccatcgtcggtggggttgttcctcgtgaatacattccttcagttgaacaaggtttgaaggaagctatggctaacggtgtgttagctggttatcctttggttgacgttaaggctaagctctatgatggttcttaccatgatgtcgattctagtgaagcagccttcaagattgccgcatcattagcattgcggaatgccgttaagactgctggccctgttatccttgaacctatcatgaaggttgatatcgttgccccagaagattacttaggtgatgttatgggtcacgttactgctcgtcgtggtaacatcgaaggtatggaagaacgtgggaatgcccaagaagttcatgcatacgttcctttggctgaaatgtttggttatgcaaccacattacgttcagctactcaaggtcgtgggactttcacaatgacctttgatcattacgaaaaggtaccaaagtcagttcaagaagatatcatcaagaagaatggcggcactcctgccaaataagcttgattgataataagaaggacgttcagcttcggctggacgttctttttttacataaatttctggtcgaactaaatgtgattactgctcgtcgtaagacaacgtggcacatcaattgaagcggcttgggatagtttggccgtcactggcattgggtacggctgtgacgagcacagtgctgctcaggcctgtgtcatcgcgcaagggtacaatcgcgcaacaagggtcgcactagttaagttactagccgctgcgaccataaaactggcagccataatattaaagggtgcgagactcatagcataataaggagaacgcggacaacatcacattttttgtaccggagataaccacatgagttgacggttgtcggtgaccacggccaaggtgctgacggtcggtggtaagcagatgacaatataatagaaggtagatgaacaagaacgtgggtcagtgtgacggcgccgtcagatgtaggagcgattgaattaagcgtgttgaagtccgattaaatgactccagacaaaaatgtatgacgctgaacgcgggtcttgttcctgagaaagtgttaatgcaatctagtaggtgtccacatgatcgtggccggtcggcagtgagaaatgtaaagcgctcaccaaaaagaaattaggcgcaaacgctattaattggatggaatttgtgttacattaattgagctggttcaaaaaggtaacacggtttacaacgatggttataaaaaaagtgcgaaaacacttgctattacagagcttttcatttattatagattgtgcttggtatttagaaggggataactatatccccatcatcaagtagtcgtagttagctttgatgtgaaaggttgcgacacgcccggccacattgtcatgggacgtggcggtaattttcacggagctagtcttattttcaaaatagacgaaggaggtcacaacaatggcaaagcaaaaaattcgtattcgcttaaaggcatacgaacaccgcattcttgatcagtcagctgacaagattgtcgaaacggcaaagagaactggtgctactatttcaggtcctattccattgcctactgaacggactatttataccgttctacgttcaccacataagtttaaggactcacgtgaacaattcgaaatgcggactcacaagcggttaatcgatatcgttaacccaacgcctaagacggtcgactcattaatgaagttagacttgcctagcggtgtagatattgaaatcaagctttaatttactaaactaaaatcaattaattggaggtgtactcatgaccactaaaggaatcttagggaaaaaggtaggaatgacgcaagtcttcactgaaagcggcgaattagttcccgttacagttgttgaagttcaacctaacgttgtgttgcaagttaagaccgttgaaaatgacggttacgaagcaatccaattaggtgttgacgacaaacgcgaagtcttgacgaacaaacctgctcaaggtcatgcagcaaaagcaaaaacgactcctaagcgcttcattcgtgaaattcgtaatgttgagcttggagattacacagtaggtgacgaagtcaaagcggatattttcgcagctggcgacgccgttgacgttacgggtatcactaaaggtcatggttaccaaggtaatatccataaggacggccaaagtcgtggaccaatggctcacggttctcgttaccatcgtcgtcctggttcaatgggtgccatcatcaaccgggtattcaaaggtaagaaattaccaggccggatgggtaatcaccaacgtacgatgcaaaacttacaaatcgttcgtgccgacgttgaaaacaacgttttattaattaaagggaatgtccctggcgccaacaagtcatttgtaacagttaaaacatctgttaagagtaaataaggaaggaggacataatacatgactagcgtagcattatttaaacaagacggtacgcaaaatggtgacgttactttgaacgacgctgtgtttggtgttgaaccaaacgaaaacgtggtttttgatgccatcttgatgcaacgtgcatcaatgcgtcaaggaactcacgcagttaagaaccgtagtgctcgtcgcggtggtggtcgtaaaccatggcgtcaaaagggtactggtcgtgcgcgtcaaggttctatccgttcaccacaatggcgtaaaggtgggattgtcttcggaccaacccctcgttcatacagttacaaattacctaagaaggttatgcgcttagctttgaagtctgtcctttcacaaaaggtcttagacaacagcttagttgcagttgatagcttagctttcgacgcaccaaagactaaggattttgtaaatgtattaaacaacctcaacgtcgataccaagactcttgttttggttgaagaggacaatgaaaaggctgctttggcaggtcgtaacttaccaaatgttaagatccttaaagccaaaggtgttaacgtcttagatgtcgctaatagtgacaaattagtcgttacccaaaaagccctcgatcaattagaggaggcgctcgcataatggaagcacgcgatgtaattttacgtcctgtagttactgaatcatcaatggctgacttggacgacaagcgctacacatttgatgtcaacgtacaggcaacgaaaacccaagttaaaaaagcaatcgaagaaatcttcgatgttaaagtcgttaaagtgaacgttatgaacgttaaaggaaaacttaagcgccaaggtcgttacgccggctacactaagaagcgtcgtaaggctattgttaccttaagttctgattctaacgaaatcaagttgttcaacgacgatcaacaataaatctaatttaggaggtaactctagtgggtattaagaagtataaaccaaccactaacggccgtcgtaatatgactgcttcagatttctctgaaatcactaagacgaagcctgaaaagtcattattagactcacaaagtcacactgccggtcgtaacagttatggtcacattactgttcgtcatcgtggcggcggtcataagcaacaataccgtttggttgactttaagcggattaaggatgaagttccagcaaccgttaaggcaatcgaatatgatcctaaccggacagctaacattgcattattagtttacgctgacggtgtgaaatcatatatcttagcaccaaaaggtttggaagttggtatgcaagttcaatcaggtgccgaagccgacatcaaggttggtaacgcattaccattaactaacatccctgttggtactgttattcacaacattgaattgaagccaggtaagggtggccaattagctcgctctgctggtacctcagcacaattactgggtaaggaaggcaagtacgcaattgttcgtttgtcttctggtgaagttcgtttagtattattaactagccgtgctactattggtactgttggtaatgaacaacacgaattaatcaactcaggtaaagccggtcgtacacgttggcaaggtaagcgcccaactgttcgtggttctgtaatgaaccctaacgatcaccctcatggtggtggtgaaggtaaagcaccaatcggtcatccatctccaatgtctccatggggtaagaagacgcttggtaagaagactcggaacaagaaggctcgttcaaacaagcttatcgttcgtggtcgccgtccaggcaaacactaataaaatttgaatttactgtagttatcgagaggaggtcacacgatgggtcgtagtttaaagaagggacctttcgcagatgcgcatttattaaagaaaatcgatgcacaatctgattctgacaagaaatctgtcatcaagacgtggtcacgtcgttcaacaattttcccaagttttatcgggtacacaatcgctgtttatgatggtcgcaagcatgtcccagtttacatccaagacgacatggtcggtcataagttaggtgaatttgtaccaacacggacgttccatggtcatggaactgacgataagaaaacgaagtaatagttaggaggatataaagaatggctgaacaagtaacatctgcacgtgcaactgcaaaaactgttcgtattgccgctcgtaaggtccgcctagttgtcgatcttatcagaggtaaaagtgttgccgaagccttagcaatcttgaagttcactccacggggtgcttctccagtagtagaaaaagttttactttctgctgttgctaacgctgaaaataactttgacttagatcgcgaagatttggtcgtaagcgaagcttttgttaacgaaggaccaaccttaaaacggttccgtccacgggcaaagggttctgcttcaccaatcaacaagcggactagccacattacgatcacagttactgaaaaataggagggataacgcgtgggtcaaaaagtaaatccaaccggattacgtgtaggaatcattcgcgactgggaagcaaaatggtacgctgaaaaagattttgctgcctacttgaacgaagatttacgcatccgtaagtatatcgaacaacgacttgccgacgcttccgtctccaccgttgaaatcgaacgcgctgcaaaccgcgtaaacatttcaatccataccgcaaaaccagggatggttattggtaagggtggttctgaagttgaagctcttcgtaaagaattaaacaatttaactggtaagcgagtacacatcaacatcatcgaaatcaagaagcctgatttagatgctaaattagttggtgaaagtattgcgcgtcaattggaaggccgggttgctttccgtcgtgcgatgcgtggtgctatgcaacgtacaatgcgttccggtgctaagggtattaagacacaagttgctggccgtttaaacggtgccgacatgtctcgtgttgaagcatactcagatggtacggttccattgcatacgcttcgtgctgacatcgactattcatgggtcgaagcacggacgacttacggtaaattaggtgttaagacctggatctaccgtggcgaaatcttgccagaaaagaaatctgctaaaggaggaaactaaacatgctggtacctaaacgggttaagtatcgtcgtgttcatcgtggtaaaatgcgcggtgaagctaaaggcggtaaaacagttgcttttggtgattacggtttacaaaccctcgaatcacactggatcagcaaccggcagattgaagctgcccgtgttgctatgaaccgttacatgaagcgtggcggtaaggtatggattaagattttccctcacaagtcctacactgaaaaaggtgtcggtgtccggatgggtaatgggaaaggtactcctgcaggttgggtagcaccagttaaacgtaacaagattatgtttgaagttgctggtgttccagaagaagttgcacgcgaagctttacgcttggctggaactaaattacctgttaaaactaagattgttaagcgtgaggaagtaggtggcgaatcagatgaaggctaaggaaattaaagcattgtccactactgaaatgctcgaaaaagaaaagtcttacaaagacgaacttttcaacttgcgttttcaattggccactggtcagcttgaaaacaccgctcgtttaaaacaagttcgtaagaacattgcgcgtattaaaactgcgttgcgtgaacaagagttaaacaagtagagtataaaggaggcaatcacgaatgagtgaagatactcgtaatagccgtaaggttatccaaggacgcgttgtttctgacaagatggacaaaaccattgttgttattgtcgaaacttacaagaaccatccggtatacggcaaacgtgttcgttattcaaagaaattcaaggctcatgatgaaaagaatgaagctaaaactggcgatatcgtcaagatcatggaaactcgtcctctatcagctactaagcgtttccgcttaattgaagttgttcaaaaagctgttattatctagattattagctgaataaaattacatgaagggaggacacttactgtgatccaacaagaaagtcgtttaaaagttgctgacaactccggtgcccgtgaaatccttactattaaggtattaggtggctctggtcgtaaaactgctaacattggtgatgtcattgttgctacggttaaacaagcaacacccggtggtgttgtcaaagctcatgatgtcgttaaagctgtgatcgtccggactaagtctggtgttcaccgtgctgacggttcatacatcaagtttgatgaaaatgctgcagttattattcgtgatgacaagactccacaaggtactcgtatctttggacctgtcgctcgtgaattacgtgataaggacttcatgcgtattgtttcattagcgccagaagtactctagtcacacaccgtaaataaggaggtgcgcaacctaatgttgattaaaactggtgataaagttcgagtaatcagcggtaaggatcgtggtcaagaaggtactgttaaaaaggttatctctgccaagaaccggatcgttgttgaaggtgttaacaagatcaagaaacaccaaaaaccaacgaacgttaacccacaaggcggtatcgtggacatcgaagcaccaatcgatgcttctaacgttatgtaccttgacccatcaaccaacgaacctacacgtttaggtgttcgtcgtgaagatggcaagcgtgtccgttacgctaaaaagtctggtaaagacttagaaaactaagactgactgaaaggaggaagcaagtttcatggaaaaccgtttaaaagctcaatatgaaaaagaaatcgttccagcattagttgacaagttcaattacacttcagtaatgcaagtgcctaagctggctaagatcgttttgaacatgggtgttggtgatgcagttaccaacgctaaaaacttagacgaagcagttgaagaattaactttgatctccggtcaaaaaccattggttacccgggcaaagaaatctatcgctggtttccgtcttcgtgaaggtatggcaattggtgccaaggttgacttacgtggcgaacgtatgtatgacttcttggacaagttgatcaatgtttcattaccacgtgttcgtgacttccatggtgtaagtactcgttcatttgatggtcgcggtaactacacattgggtgtccgtgaacaattgatcttcccagaaatcaactatgataatgttaaccgtgttcgcggtttagacattgtaatcgttacgacagctgatagtgatgaagaatcacgtgagttgttaactcaatttggcatgccatttgctaaataaccgaagggggttaatcgaagttggctaaaaaatcacaaattgctaaacaaaagcgcggtgctaagtttaacgtacaaaactacacccgttgtgaacgttgtggtcgtccacattcagtttaccgtaaattccacttgtgccgtatctgcttacgcgacctggcccacaaaggtcaaatccctggtatgaaaaaggccagctggtaaaaacaaacccaagttaaaggaggttaaactttcatgatgactgatccaatcgcagatttcttgactcgtatccgtaacgctaatatggtacgccacgattcactagaagttcctgcatcaaaaatcaaacgcaacattgctgaaattttaaagaatgaaggttttgttcgcgacgttgaatacatcgatgatgacaaacagggcatcatccgcgtcttcttgaagtatggtaaggacaacgaacgtgtaatcagtggcttgaagcgtatttcaaagccaggtttacgttcatacgtcaaggctgatgctgttcctaaggttttaaacggtttagggattgctatcatctcaacttcagaaggtgtcattactgataaagaagctcgcgccaagaagcttggcggcgaagtattagcttacgtttggtaatcattaattaagacgggaggtgcaagtaagtgagtcgtattggttataaagtaattgaactacctgctggggtagaagtatcacaagctggtgaagtcgttacggttaagggtcctaagggtactttaacgcggaacatcgccagtgatattacgatgacggttgaaggcaacgaagttaaattcactcgtccatctgatgactacaagatgaaggcattacacggtactacccgtgcaaatgttaacaacatggttgaaggggttactaaaggctttactaagaaccttcaattggtcggtgttggttaccgtgcccaattgcaaggcaagaagttagtattaagcgttggttactcacaccctgttgaattcgcaacgcctgaaaacttgactgttgaagttcctgataacacgcatatcaatatttctggtattggtaagcaagctgttggtgactttgctgccgaagttcgggccgttcgttcacctgaaccttacaaaggtaaagggattcgttacgtcgatgaatatgttcgtcgtaaggaaggtaagactggtaaataatgcagcgtaaagctgtccatactaatatatagaggtgactattgtgatttccaaaccagataaaaacaaaacacgtcaacgtcgtcacgcacgtgttcgcggtaagatttctgggactgctgagcgcccacgcttaaatgtttatcgttcaaacaaaaacatctacgctcaagttattgatgatgtagagggtgtaacgctcgcaagtgcctcaactttagatagcgaagttaaaggtaacaacaagactgaaaaggctgcatctgtcggtgaagttgttgctaagcgcgctgctgaaaagaaaatcgttgacgtcgttttcgatcgtggcggttacttatatcatggtcgggttcaagctttggctgaagccgctcgtgaaaacggacttaaattctaacaaaggaggaataataccatatgactttcattgatccatcaaaattagatcttgacgataatgttgttgccattaaccggattaccaaagttgttaaaggtggtcgtcgcctacgttttgctgcattagtaatcgttggggaccacaagggacacgttggtttcggtactggtaaggctcaagaagttccagaagcaattcggaaagcttccgaagctgctaaaaagaacttgatcactgtaccaatggttggtaccaccattcctcatgaagcacttggtgtttacggtggtggccgcatcatgcttaagccagccgttgaaggttctggtgttgccgctggtggcgccgttcgtgccgtcatggaattagccggtgtggatgatgttactagtaaacgattaggctcaaacacccccgttaacgttgttcgtgcaacgttcgaaggcttaaagagcttaaagactgctgaacaagtcgctgctttacgtggcgtttcagccgaacatttagctgaatagggaggacaaacaacatggctcaattaaagatcactttagtacgcagtgctgctcaccgtcttcctaagcaacgtaaaatcgttaaggaattaggtttgggtcggattaatagttccgttgttaaacctgatgacgcagcaactcgcggtcaaattttccacatcgcacacttagtcgatgtcgaaatcatcaagtaattcaaattttcaaagaggaggtgcctactaaatgaagttacatgaattaacacctagtgaaggttcacgtttttcacgtcgtcgaattggtcgtggtgactcaagtggccaaggtaagacttctggtcgtggccaaaaaggtcaaaaggcgcgtggtaaagttcgtgtcggtttcgaaggtggccaaatgccattgtaccgtcggattcctaagcgtggatttactaacattaaccgtaaagaatatgcggttgttaaccttgacggcttaaaccgttttgatgatggtgccgaagttacaccagaatcattaaaggaagctggcttagttaagaagagttctgctgttaaagttcttggtaatggtaaactcaacaaaaagttaacagttaaggcaagcaagttctctgcaacggcggttgcagccattgaagctgctggcggtaaaactgaggtgatctaatttgctgactaccatgaagaacgctctcaaagttaaggatattcggaataaacttctgttcacgttgggcgttttgattgtatttcgtcttggctcttatatcacagttcctggagttaatgcacaggcacttcagtcggtggcatcttcagggctgataagtatgttgaatacattcagtggtggcggtttaacaaattattccatccttgctatgggggtatccccttacattactgcacaaatcatcgttcaattgttacaaatggacattgttcctaagtttgttgaatggggcaaacaaggtgaagttggtcgacgcaagcttaatcaagcgacccgttggttaacgatcgtcttggcctttgttcagtcgattgggattacggctggttttaactctttgagtcaactcaagctcgttaacaatccaagtatttcgacttacctgaccattggggtgatcctcactggtggggcaatgctgacgacttggatgggtgatatgattacggatcgaggaatcggtaatggggtttccattattatcttcgccgggatcattgcccgtatgccaacatcgatttatcaaatttatcaagaacagttcgttaatgtttcacagagcgactggtggaagagtggcttgtttgttgttgggttagccttgcttgtgctgatcatcgttatgtttgtaacgtgggtcgaacaagctaatgaccgaattccaattcaatacactcgtcgtgcagctggtgcacctgacagtagttacctaccattaaaggtgaacgttgccggggttattcctgttattttcgcgagttccttcattgcaacgccccaaacgattttgctagggttccaatccagtcatggtgacgaaacctggtataccgttttgagtaatatcttcaatatgcagtcgacgactggtgctattctttacaccattctgatcgtgctcttcacgttcttctatgcgtttgttcaggtcaatcctgaaaagctctctaagaacttacaaaagcaaggcagctatattcctggtgtttggccaggtaaggatactcaagattgggtttcaaaattgttaatgcgactaagtacggtcggtgccctctacctggggttgatttccttgattccattattagcttctgatatttggggtctcgatgaatcaatcggtttaggtgggacgagtttactaatcgttgttggggttgcccttgaaacaattcgtcaaattaaaggattgatgatgaaacgtgactatgtcggtttcattcgttaatcagcgaatgtgttggggagactcaacacatttgtgcattcaggaggaaaaaacatgtcaacaatgaacctgattttaatgggattaccgggtgccggtaagggtactcaagcacagaagattcttgaagattttgatattccacatatctcgaccggagatatcttccgtgcagccattaagaacgaaacgaagatgggcttggaagccaagaagtatattgatgcaggtaacttagtaccagacgaagtcactaacggcatcgtccgtgatcggttagctgaagcggatactaaaaatggtttcctattagatggttacccacgtaacatcgatcaagctcatgctttgaaacaaatcggtgaagaactcaataagccacttgatggggtcatcaacattcatgttgaacccgcagtacttgttgaacgactttccggtcggtttatctgccggacttgcggtgcaacttaccataagttgtacaacaagcctaaggtagaaggaacctgtgatgtgtgtggcggtcatgatttctatcaacgtgatgatgacaagccagcaaccgttaagaatcggttagacgtgaacattaagttgaacacgccattaattgaatattacggtcaagaaaagttactctacaatgtcgacggtgatcgcgacattgatgatgtctacaaagatatcaagaaaattcttgataacctgtaaaccaggttccttcagcagcgacgtttgcttttcaaaggtcgttgtgataaaattattcaggtttagccgttgactgatttaatatttttttaatgttatgattagacaatgactggttcagtaatggaccaaatacgtggtagcacggaatctgataataaggagggacagtacttggcaaaggaagacgtcatcgaaattcaaggaaccattaaagaaacgttgccgaacgcaatgtttaaggttgaacttgaaaacggcgctgaaatcttggcacacgtatcaggtaagattcggatgcattacattcgaattctgcctggtgacaaggttacagttgaaatgtcaccttatgatttaactaagggccggattacctaccgtttcaagtaggctcggtctacgtaccttataggaggtaaaaaactcatgaaagtaagaccatctgtaaagccaatgtgcgaacactgcaaagttattcgtcgtaaaggccgcgtgatgattatctgctctgctaatccaaagcataagcaacgccaaggtaaataatttaattaagttggaggtgaaatattaatggctcgtattgaagggattgacttaccacgtgacaagcgtattgtcattggtttgacttatatctacggtatcggtaacacttctgcacagaagatccttgctgaagccggtgtttcagaagacgttcgtgtacgtgatttaactcctgaccaggaagacaaaatccgtgccgttgtcgatggttacaaaactgaaggtgacttacgtcgtgaagtcagcttaaacatcaagttattgcaagaaatcggttcataccgtggcatgcgtcatcgtcgtggtttaccagttcgtggtcaacacacgaagaacaatgctcgtactcgtaagggtaaaaaggtcagcatcgctggacgtaaaaaataataataaaggaggttttcgaattttatggcaactagaaagacaacccgtcgtcgtcgggtaaagaagaacattgaatctggtgtggctcacatccattcaacgttcaacaacacacttgttatgatcactgatatgcaagggaacgccattgcatggtcatcagctggttcattaggtttcaaaggtagtcgtaagtcaacaccttttgctgctcaaatggctgcagaagctgctgctaaggcatcaatggaacatggtatgaagactgttgaagtcgctgttaagggtcctggttcaggccgtgaagccgctatccgtgctttacaagctactggtttggaagttagcgcaattcgcgatgttacgccagtgcctcacaatggttctcgtcctccaaagcgtcgtcgtgtttaatctgtgacgttcattttgagggcaaacttcattttgtacgcacaactactaaacaccacgcgttttgaaaggggtaaaagataagaatgattgaatttgaaaaacctaacattcataaaattgatgaaaacgacaactatggtaagtttgttgtagaaccgcttgaacgcggttatggtacaactttagggaattcacttcgtcggattcttctttcttctttacctggcgctgctgttactagtattcaaattgatggtgttcttcatgaattttcaacgattgagggcgtaacggaagacgttacagcaattatcttgaatgttaagaagattgcacttaagttggaatcagacgaaaccaagacgttggaaatcgacgttaagggtcctgctaacgttactgccggtgatatcattggcgatgcggacgtagaagtcttgaatccagacttaccaatttgtaccgtagcagacggggcacacttccatatgcgtatgaccgcaaatactggtcgtggttatgtttccgctgaggataacaaacatcgtgaagatgacatgccaattggcgttttagctgttgattcattgtattctccaatcgaacgtgtcaactatcaagttgaaaacacgcgggttggtcaacgtgatgatttcgataagttaaccttagacgtttggacaaatggttcaatcactccaagtgaagccattagtctatcagccaaaatcctgactgatcacctttcaatcttcgtaaatctcaccgatgaagctaaaaacactgacgtgatggtcgagaaggaagaaacgcataaggaaaagatgttagaaatgacgattgaagagttagatctctccgtccgttcatacaattgcttgaagcgtgctggcatcaacacggtccaagaattaactaacaaaactgaagctgatatgatgaaggttcgcaaccttggacgcaagtcactcgaggaagttaaggcaaaattagctgaccttgggttatcattacgcaaagaagactaatacaagggaggatatccgttcatgagttaccgtaaattacaacgtacaagttcacaacgtcgtgccttattacgcgatttgacaacgtcattgatcgttaacggcaagatcgaaacgaccgaagcccgtgctaaggaagttcgttcaactgctgacaaaatgatctctttggccaagaagggtgatttaagcgcccgtcggaaggctgccgcattcatgcgggacgtcgttgccgatgttaaggaagatggcgacaacgtggctgtacaaactgcattgcaaaagctatttagtgacttaggtcctcaatatgctgaccgcaatggtggttacacacgaatttacaagactatgcctcgtcgtggcgacggtgcacaaatggttgtcttggaactcgttgactagttaagattgttttacggatcactgggactgatgattgacgggcgttatgatggtggctactggcaaaatagtagctaagtctagttcggaagttatttatggttagacatagatggcatatcgcagttctaagtgattttttttggtgctagttacgagcaaccgctgatttagggattgattccctaaatcagcggttttttgttggaatggataggtgtttttaatactcgtgatgacaacggtttgttatttgcagattatgacctgttgaatcgggaaagtggatatagtggtctcaggtactgactgtgaagatgaagcacatgggcgtttagctgtgtctgggcgacaaaaaaggtatcaaacaggatgcttgataccttagtcgattgattactagttaattatgccggtccaacagccgtttggttagactaatcagatccgtcttcgcaggctggtctggaagtttacgcatgattgccagcgcgtcttgagtgtacttggtagcgagttcttgggcttgcaccacaccgccggcattgatgacaagtcgttgtacttcctggcgctgagtgtccgaaattgccccctgtagtcgcatcagcggcaataaatcgtgcttagcttctgtctgtaaggcaaaaatcaacggcgaggtgtagacaccttcagcaacgtcttcgaggatgggtttgcccgtttcctgactgacttcttgatagtctaaaatatcgtcaagaatttggaaggccatcccaattgcgagacctgctttacgagcgcgctgggcgaaatgactactttgaccagattcataagcacctagaaaacaactcagtgcgaataactcggcggtcttaccttgaatttgttgcaagtattctgccatggtaatgtcaaggtggtagtggcggtccttttgttggacctcgcccactagaatcttttccatgttctcagagttcatctggatgcttttgaaactgcttgaatagtgcgctagaatcttgaataccacaacgaataggtagtcgcccgcatacacagcagtatctttaccaaaacgttcttgaatcgtgacatggtgccgacgtagtgcagcatcgtcaacaatgtcatcatggatcagcgtagcggtatggagcgtttctaatgacgccgctaaggccaccatccgttgccgatcagttgttgtaaattgtgagaataggaggcagtatgccgggcgtaagagcttaccaccaccatgaatcatttctaaaatcgcgtcattgatgtcggcatcttgaatattgatgttcgccgtcatcagctgcatcacttgttgcagctccggttgtagtgccgggtaatcacgccaaattgggtgtaattgtgttgccgattgcatatgggttactcctttgtttgatctggatggtgttctcgattgaatttgagatagcgtaagatcgtgacgtgggtgaacaagtagttggcggcgattccgagagcacttcccgctgctagtccaataatcgaaagcactggcaagtagagcatgaccgtccacgtctgtgcaataagactcgcgaccaatagctgaccaacattatgcatgacgccaccagttgctgaaattccaataatactaacgcgtttaggccctaattgtttgaccaacagcatggcaaacaggctgagaaaggcgcccccaaaactatacagaaaggttgataaagtgccacctaggagggccgttaaaatcaaacggagccaggttagggttatcacgtcagttaatgataatgtatagattgcaacaatggtaatcagattggctaaaccaagcttggcacctggggcaaaggcaaacgggaatggaatcatccgttcaaggatgccgatgatcacgccttgtgcaaccagtaacgcgatataaatattacgatgagttttgtttgatcgttcaaatgaattattcatattctactccgtaactaaaccattaccgccagatttgacttgaccgttgctggccttaatttcaaccaagagtttgtggggcaaacaaacaatcgtttgaccaggtttatgaatccagcctcggcggacacatacttggtcagaacagttggctttcgtaatcgcaacgcgcttaggtttaaatgtgatcgtgttgtagtgcccatggttatcgcgataggtgaagtgcttagtcgttttcagattcgtaatattgacacgcttcaagacggtcccattatgtgagaccacggcgttatacgtggtttcactgctcgtggcctttcgcttagccactagtgccgcatgttcagcttgttgtttttgctggtatgaaaaaatcgctagtggggtgaacgataaaataattagcgcaacaataataataatatcaaacggcttgatcatatccccataacgtttgaatgtccggatcattgtccgtaatttacgcatcgttaaccctccaattcaatgaaataaaaaatggttcaaggggggaaaaacaacccttgaaccatcgggaaaggatttaattaattataacgcatctagcgggttttaacaccgtcgtaatgagaacgaacgttgccgtaccaccagtgtccaaggtgtttttgcatccacggaacgacccagtagtctaacccaaatgtccgtccggaaccgttcattaaggcgagggcaacaaagatcatccaaatgttgacccagtagaacatgccagataagcagaagacgacaactaagccaatggtgactgcgttagcaaaccaagtaaagagtccgaagaaaatacataatgcaatgacgatttcaacacaagtcatgaatttctggaagaagagggccatttgcatgttcggaatgaagaccttggtaattgattcgaaccaatgtggcattttgtcaaagaccatcaggggttctttaccgtacatgtatgaaagactgaagacacccttagcggctttagcggttgacgtggcagcttcagaagcaccactggttgcagcggctttagttgcttgagaggcaccactggttgcggccacggtaatccattcgaatggtaaccgtaacttgtcagtgaaccaggattcagatccctgaactttagtccagcagtcccataaccacatggcaccatagaagaaccgcagtggcacactccagagtacgttaccagcccgtgagacccaaccgcggaagacgttacggttattacgagtccggaagaattcgtgcatgaagtactggaataggtagtaacctgagaaaatctgaacgtagtacatccagttgatggcgtgttttaaaagcacggcaataaaaccagagacgttccacttctctaaaacttgtgcaacggcatatttggaaccaattgagtcgacggatgcttgataagcgcccttaaatggcttgatcgtaacgtcagtctggtcaacgttcttaataataccttcgacggccttagctgcggtttcttcagccccttgaacgatttgtgggactggccgtggttggtcaggttcttggtagctggttgaatcaccggctaagaagatattgttacaatccttagcttgcatgaattcattggccatcaagcgaccaccgcgggggttagtttcaatgccgaactttttaacgatactattagcacgaacaccggctgtccagattaacgtgtaggttggaattggatccttgccttttaagttaacatggtcttcacagacttcggtaatcatggagttcgtcatgattttgacaccatgtttttccatgtacttagcggccttaccggcttgcgtccggttgagcatgttaataatagtcggcgctgcttcgaccaattggagcgtgatttcacttggatcgagcttgttgtctcgagccaaaacatcacgatattcgattaattcaccaatcagttcagaaccagtaaaaccagaaccacagactgtaaaggtcaacatggctttgcgcttagcagggtcgagctccgccgccccccgccgaataattgcagataagtgagcacgcaatgccatcgcttgttcgaaggaccacaattcgaagccgtgttccttaacaccgggagtcccaaagtcattggattccccacccaaactaattaaaagttgatcatattgataacttccgtgttcggtagtaactgtttgtgcctttttgtcgatgcccgtcacggtatcggtcacgagacgaacgttttttcgccgtgcgaacaaccgttgcaaatcatattggatatgctcaggttccacccgttcggtagcaacttcatgtaattcagtcatatacgtgaagtatgaatgccggtcaatcaacgtaatctcgacgtctgcattttttttgaaatgcttagacagtttcttggttgcgtaaacaccagcaaaccctgcaccgacaacgacaatatttttctttgccattgcgtaacaactcccttgaataatagtgtaaaaagataattccactaataattataacgataatgtaagcggttgtctatggattatgggaaagaatgcataaactatcacattatctaagccgcgaaaatagtggcatcgaggtttgaacggaaaacgttgtcaataccgctattattaggctaaaatatcatttttttaatggaatgggattgactattaccagtttaaacgttaagattaatgtgaattttcatacaaaaaggttaggagtgggatatcatgaaattcaaatcagttattacgggtgcttcagttgttgcaatttcagctttagctttagcaggttgtggcagcagttcttcaagttctagctcgagttcatccaagaagagttcatcttcaagctcatcagctaagacaactaaggttgctaaattaaccgctggcagcaaaatgaaagcgggtacttataaccttgaagaagaaaattattcacatggttatcggaccaagatgagtatcacagttaataacaacggtaaaatcactaagtccagttatgaccaagtgaacaagaacggcaagtccaaagttgatgatacttcatataacaaacaaatgaagaagatcgctgggactaaccccaagacttacatgcctaagttaaacaagacgctgacgggctctgccgctactggtaacgtgggctccattgatgttgtgactggtgcgactgaatcatcaaagaccttccaaaactacacacaacaattagttcaagctgcccaagcgggtaacaagtcgaccattaagattgacaatggtgccaagatgaaagatggtacctacaagttgaacgaaaagaactactcacacggttacaaagttactttcgcaatcacggtcaaggataataagattacgaagtctgaatataaccaagtgaacaagaatggcaagtccaaagttgacgatgcagcttacaacaagcaaatgaagaaggttgctaagactaaccctaagacttatcaaccagctttgaacaagtcattagttaagagtagtgatccaactaaggttgacgttgtcacgggtgccactgaatcttctaacacctttattatgtacgcggaacaattacaaaacgcggcacaaaagggtgacaccaacacgattactgttgacaacatgattttctctgaataagcaatttaattattagattcttttgaggcctgaggcgcatgctgagggccttttgtttttaattgaacaaccacaaaagtttgtcactcagttgggcacgactttgagcaagctaaatccatacatggatattggtttaaaaaataatagtggcggtgaatgttaagtgcaaaatggctgtggtagtacaaacccgaccgtcgagttgtaccgtttgctgtaggtgcgctgatgtcagactagcgtagaaaagcttggatgacgcgcaaacagtctcaccggatgaatcaagactttggtataatgacaattgaaattaaaaataggggaagtattggaatgaagctaaaaaaatgggttcgaattggattaattgttgcaatgatcgtgccattgacggcgtgtgggacgagtacgagtcgcaaaaatgctgctagtagccgacccaaaccaactaaggtcgtcaagacgccgatcgaggatacccagttcatgatgggcacagttgtcacgttgcggatttataataagggtaaggataacgtgttagctggggcgtttaagctgttgaaaacggaagctaaggaaattacggtcaatcaaaaaggatctgaaattgataagatcaacgccgctgccggtaaaaagccagtggctgtcagcaaggatatctacccaatgatcaaagcagcttactattatagtaagaattcagacgaatcctttgatttagccattggcccgatcacatcactctggcatattggattttctgatgccaaggtgcccactcaacaagaaattgacaagaacgttaagctggtagactacaaaaaagttaaattaaatgacaagaaacggaccgtttatctagaagaaaagggaatgcaactagaccttggtgggattgccaagggttacatgaccgatcaagtgaagacgtacttattaaatcatggggtttcaacggccattattgacctcggtggtaatatttatgttctgggtgacagccctaaaggaacgaagtcaggtaactggacagtcggtatccaagatccaaaagcgtcacggggtacggccattggctcactacctgctaagaataagtcaatcgttacttctgggatctatgaacgctatttgaagaagaatggtaaagtttacagtcatttgatggacccacaaacaggggccccttatcaaaacaatttgatgggcgtttccatcatctcgaagaagtcggtggatggcgatgcactatcgacggccacctttgacaaaggcctcaaaggcgggatgaagtacattaatggtaaagcggatcaaggtattggggccatttttattaccaaggataaaaaagtatacgtctccaataacttgaagaagcagttcacgctgtttggcgatgctggttacaaatacgggccagccactgatttaaagtaagattggacgtgaagttcagttactacaagttccgtcagatatgttatgataataaccatgaattttaaggaaatgagggacaatggtgagtccgattattgacgttaaacatttagattatcgttacccgcaacaagctacggatcagttaacgttacacgatatttcatttacggtcatgccgggtgaatgggtcgccattgtcggccataacggttctggtaagtcgaccttggccaagaatttaaacggactgttagcaccagcggctggaacgattacggttgatggtcaagtattatctgaagaaaccgtttgggacattcggcgcaaaattgggatggttttccaaaacccagataatcaattcgttggggcaaccgttgctgatgatgttgcgtttagccttgaaaaccagggcgtgccgcgttctgagatgctaacgcgggtacaggcggctctagaacaagtcaacatgcaggattttgcgacacgtgaaccggcacgtttgtcaggtggtcaaaaacaacgggtggcgctggctggtatgatagcggcgcggcctcagattttgattctggacgaagcgacgtcaatgttggatccccgtggtcgtcaggaagtattgacgacgattcgcgatatgaaggctaattcagcgttaacggtcttgtcaattacgcatgatattgacgaagcggccagcgctaatcgggtcttagtgatcaatgacggtgaggttaaggaagaggggactccagcggaaatttttcagcatggagaagccttaattaagatgggattggacatgccatatgctgagcgcttaaaagcagcgctaaagcggcagggtgttcaagtgcccgcacagtatttaacagagaaaggaatggcggactggttatggcaattacgttcaaacaagtagattttacttaccaaccgggtacgccgttcgaaactaaggcgttaactgatattaacgtcaccattcccaccggctcttatacggctttgattggtcatacggggagtggtaagtctacacttttacagcatttgaacgccttactcaaaccgactagtggaacggtcacgattggtgaacgggtcattacgccaacgacgagtaataaggatttgaaacgattgcggcaacacgtgggcatcgtctttcagtttccagaaagtcagttgtttgaagaaacggtggccaaagacattgcattcgggccccagaattttggggccagcgaagcggatgctttgaaaactgcggctgaaatgttggctttagttgggttagacgagtcgttactgacgcggtcaccgtttgacctctctggtggacagatgcggcgagtggccattgcgggggtccttgcgatgcagccgcaagtcctagtcttggatgaaccgactgccggattggaccctcagggccgtttagatatgatggagatgtttgcccgtttgcgccatgaacgtgatttgaccgtggtactagtgacccatcagatggatgatgttgccaattacgcggataatgtaatcgtgatggatcgtggacaaatcgtcaaaacggggacgcctcgtgagatcttcaaagatcctgcgtggctgactgcccatcaactgggcttaccgaaaacaacggcctttgcacatacactccaaaagcaaggctggcaatttaatgagtggccgttgaccgaggacgaattagcagcagccatcgtccaacagttgccaccgaacgcaatgggggaggtggccgctcatgatgaataaattgatctttggtcgctacattccgggagactccgtggttcaccatatggacccccgggcgaaactgttactgagtttttattttattgggattatttttattgccaataactgggcgacctatgccttgctatttgcctttacattggccgctatttacctatccggtgtgaaatggtcgttcttcatcaacggcgtcaaaccgctgatttggttgattttattcaccgtcatcctgcaagtgttgtttagtgcaagtggcgggcacgtttactttcaatggggcatcattacaatcagccaacttggattgatcaacggagtctatattttttgccggttcgtgttgattatttttatgtcaacgctgttaactctaacaacgccgccactggaattgtcggatgccattgaatatatcttgatgccgctcaaagcggtccattttccagtctatgaagtggcgctgatgttgtcgattgccttacgctttgtgccaacgttgatggacgaaacggaaaaaattatgaatgcacaacgggcccggggggtcgactttggtgaaggcaatatctttcaacaaatgcgtgccgtagttccgctgctgattccgctgtttgtcagctcatttaaccgggctgaggatttagcaacggcaatggaagcacgtggctatcaaggcggcgagggtcgcagtaagtaccggattcttaagtggcaccaacgtgatacgtgggctaccggatgctttgcgatcttgaccgttgcattgattttcttgcgtgcataaatgaagactgattaacgtgggcgtcgcactgatggcgacccacgtttttaactggagggatattgtgaccacgcggtataaagtagttttagcatatgacggcaccaattttgcgggttttcaacgccagccacaccagcgaactgtcgagcaggtcgtcactaaggcggtcaataagatggcgaaagatcccgttgaaccgattgtgatctacggcgcgggccgaacggatgctggtgtacatgcgtttggacagacgttgcattttgacttgccgtacgaaattaatccagaaggggttcggcgcggcctgaacagcatgttaccgatggatacaatcgtaaaggccgtttccattgtgccgaatgattttcacgcgcgttatgatacggtcggtaagcggtactggtatcgggcctatcaaaatgaatttgtagatccatttaaacggcactatacggggcattttaagttcgctgcggatattgacagaattcagcaagccatcggtgacttagaaggacggcacgatttctcgaccttcgttgcgtccggttcgcaagcacatgaccatgttcgtgagatctattcagccaaagcgtgggccttgccggatgaacgcgaaattcagtttgaattttgcggtagtggttttttatataaccaggttcgaattatggtggctgttttgatggaaattggtcagggccggcgcgcagttgactgtattccagcattactagcggctaaagaccgtgagcaagcgcggggaacggctcctgcggctggactttatatgaaaaaagtgtattatgaacaaaatgaattacaagctgatttgataaagtattgacttctgaggcgaaattgggtagactagtcgttggtattgtttgccccacgataagccccggaaatcttattgagtgtcaaacaaacacagaaaatggaggaacacaacgtgcgtacaacatatatggctaaaccaggtgaaattgatcgtaaatggtatgtagttgatgcaaccgatgtacctttgggtcgtctttcaactgtcgtcgcatcaatcttgcgtggtaagaacaaacctacctttacccctaacgtggatactggtgataacgttatcgttattaatgcaagcaaggtcgctttaactgggaagaaagcagaacggaagatttattatcatcatactgcttatgctggtggtttaaaggaacggactgccggtgacttcttggcaaaggaacctactaaattgattgaaacttcagttaagggtatgcttcctcacaactctttaggccacaagatgggcttgaagttgcatgtttatgctggtgcagaacatacgcaacaagcacaaaagcctgaagttttggacatcactaacttaatctaaggaggaaactacattggctcaagtacaatatcgcggcacaggccgtcgtaaagattcagtagcccgcgtacgcttagtaccaggtactggtaaaattgttatgaatgacaaatctgttgaagattacattccatttgcagatattcgcaaggaattgttacaaccattcgaagtaactgaaacaactgatcaatatgatgttttagttaacgttaatggtggtggcttccatggtcaagccggcgcaactcgtcatgggatcgctcgggcattgctcgaagttgacccagatttccgtactcctttgaagcgcgcgggtctcttaactcgtgatgctcgtatgaaggaacgtaagaagccaggtttgaagaaagcccggaaagcttcacaattctcaaaacgttaatattatccaaaaacgttgttttatcaacattttctggctatatgagaaagcacctgtctatggacgggtgcttttttttgttgtttgaacagaaaaaataacacaaaactaaaacatggtagggctcatgatataaaatagaccactttgttagcgtcctggctggcagcacgtgttcatgtcagtacgacttccggggtgagcgactatgcagttagcccgccttgaaacaagctaagcaagtaacgctcggttacttaaaaatggattgggccattgacggctcaatccattttaattactgacgtttagttttaccaaaagagaagacggcaacgcaaccgaggccggtatggctagtgatagtcggcccaatgtgttcgagcaaaatttcagcatcaggaaccttggctaaaatcttttcacgaacggtttgggcggcttcctgagcgtcgctagtggcaatgataatgcgcggcttggtctgatcacgtaaatcggctagtgtgttgttaactagtgtggtcagtgaccggcgccgtgagcgcaccttttgtactggacgcaagtggccgagtggatcgacgtccatgactggcttgatctgtaagagtgatccaaccgtcgcggaggtccgtgagacccggccgccgtgataaaggtaatttaagtcatcaacggtgaaccattggtgataatagaggcggttttcagtcagccaatccgccaattgggcgattggcataccagcatcgcgcttgtcaatggcatctagtagcatcaggccttcaccgcagcaggctgctcgggaatccacgaggtagatctcggcatctggctggtcttgtaaaagcatggtcttggcctgttgcgcattattgaaggtcccacttaagcctgatgaaaagccgaggtataggattggcgtatgtgcctgaacgtacggcttgaaaaattcaataaactggccgatattaatctgagcggtagaaggcatcacaccgttaccaatccgatgataaaagtcagtcaagtcaaagtggtgacccaaatcgtccgcgtattcctggtcgtcaatcgtgacgttcattgaaacaaaatcgacatgcttgtccttaagtagttgataaggtaaatcaacggttgaatctgttaatagctgatacatagctttctcccttaattgtacttactgttacattgtacgcttatttgggcggccatggaaaattaatacatgctgtatttttacatacagcagtaatttacggtaacaactagttggttgtcgcaatcctggtagcagcgtgaatgctgatcaagaaattgaactgggcatgtcagtaaatactggacgcatcggaaggtcagttatgggttaactgcaataatggcgtagtgactaggaccgtgcttttcagtcatggtgatgaggttcgacgactaatttgcctattcaatgaggcgctgtaagttgattgaaatcagccgatcaatggcgtgattttgctgctggcggtagggggtggccccggtttcataaaggagttgcgcctggtgatgatgaacgctgatctgttcgagttgcggaggcaatcgaagaatcgcgataccggtggtcagttggtgctgttgaattaattggctgcgcttgaatagcagtaagtgtgaggcgctggggccgtatgactgtgataacaagacgtagtggtcatagaaggccattccttgaatattgggtgggagcttgccgtgccagtcactaactgcctttggtaaaatggcgtgactcgtggtcattctgtatggcgtgccggcgctcgtcagtggatagcgggcaaccaaggtggtctgtccaggtttgaactggccgacataaagggcctgatggtgataggtcagtagtgaggcattgctcagtgttggcagtgaccagcgttgctgatagtgaacggcaatggaagtggtcgggtcgaagtgccgtaatgcggccagactaacgctcacgatagccccatgaccgtggcgatgactgcacaaccaaatccgctggtggtgagggtcataagctagaccacccacatgtggtttaccatgcaataagacagtgttgcataattgatgtcggaaacgatcctgtacatataggacagattgggttcgaccagtggcatcgtaagcggtggttagacgataacgaccggcaataacaacgccctgtggaatcatcattgtcgtcgtcgtgagttgtttagtgacgaggtccttagtcagggtggcttgtagtcccggctgaatggtggtgccttgcaacataccgattgggtcgaattttgctagtttaaccagatccggatactgacggatggtttgataaaattcggttggtgaaaaaacagcttgggtggctgttctttgaagggtggttggtgggtacggtagtgtcggtcgtacgcgactagctagaccgccgaggggatggccccaaattaacaagcctgtgattagtcctgtataaaaatgataggtataacggtgcatcgcgggtccctcctctagtttaagtgtcttcaatatagcatggaaagacaggccgcttagcggatagtgaaaggttagttaaggaaagaaactgagtggggcataattgaaaaattaacgttttacacatctgtttttaattacatttacataaaacattgaattttctaattaggaatcggataatgaacgtgttcaagctgtttagcaatctgaataaagtgtgatatcccggtgctcgccaagttaggcgagtgctggctgtcaaaaacggaggaaaatataacgatgcgaattagtgcggaaacggaacgacaatttttagaagcagtttttaaggcccaacggtttagtgccaaggatggggcactgctggcagacaccctggtcgatgcagatttacgtggaatctcatcacatggtatccagcggctggcttggtatacgcggatgatcaaggatcataccttggaaccgacgaatcaaccgaagattttgaatgaaacacctaccagtctattgatcgatgcgaaccagagcatgggccagattgcgtcggcgtttacgatgaataaactgattgaaaagactaagcaactcggtgtttcattagcggttatccgcaattcgaatcactttggaacggcgggctattattcgcgcatggcttgcaaagcgggtttgatcggtatttcaacgactaatacgcggccgttggtggtgccgacgaatgcgacagaagcttttttgggttccaacgcattagcttttacttttccagccgacccgcatcctttcgtttttgacggcgcgactgcggtggtttcaagcgggaagattcaagtgctggccaaaaaaggtgcacagattccgggtgattgggcggttgatgagcatcgtcaagtcttgcatgatgcgcagacggtggaggataacttggctaaaattgcgttttctgagaatcgtcctggtggtggggtcctgaccctaggtggccagcaggaagtcaattcaaattacaaaggctttggcaactcactaattattgagttactcacgggaattttagcgcaagggtcgctgtcggctgatacgaacaccggtaagcatgactttagtcagttcttcatgacgattaatcccgccttatttggcgatcccgaggtgttgaaggccaacgtgacgactatgtttgaccgtattcggcatttgaagcatctaccaggtactaagatcatgataccaggtgaccgggaataccggcactatgatgaaaatttggtgcagggcgtcagtattgatccacagacgttgacggaaatgcagcaagttggtgctgaatttggagtggcagtccccgcagccttgaaagcgtagtttggtgtagttgcggcaattattgtgactaaaatggggatcacataaactgatgatagtgtggctggaatctgctctggatgctggcgacactatttttggttatcacgattatgtgcggtggtgaagaccagctagctggttgggaatagatggcagttcagacaactgacgagcggctaaggttagttgctaaagcatacggaacattgttgaaattgtaatcgaaaatgaccgtttgtcagtcgttcgttgtgagaaatttagcgttggagtgcggcttttagactttaatgatttgcctggcggtggattataagttaagtcagtgcaagctactggctaaaaatattttcagaaagtggcagggaaccattttaatatctgtaaaatgatttgacacgcaaacttgctgatttaccagtatttattagcagttagcgaggatgatgacgactagcaaatcgagggtggaccaacatgtttttgttgattaatagaaaaagtttgcaaaaaccatttgacaattctattgattagccgtatattttaagtcatcaaatacacattataaattaaggagattttaatcatgacgattaataccaatttacaattgaattcgtattattattactggtttacttagtgccttggcatccactgcgaggcacgccctcgcaacggatgtgaccagtaaattttggaatgattaaaatttatggaaaagtcatatcagtgttgtgaacaaccactgtgtgacttttctacttctgagtagcggtgtttttcgggcaccctgcgaagaattagtggactcacagttggtgtaactgtgagtcttttttattagccaaaatgagagggagcgaagttaatgcaagcatttgatgaaattgatgaattagcggtgaataatctacgagtactgagtgcggaaatgattgaacgggccggttctggtcatccaggattgccactcggcgcggctccaatgatgtgggcactgtggagccgacaattacgggtcgatccacagcagtctcaatgggctaatcgcgatcgctttgtcttatcagccggacacgggtcggcgttgttgtacagtctgctacatgtgagtggcttcaacgtgacaatgggcgagttacaacgttttcgtcaattcggcagtcatacgccaggccaccctgaactgggaatcgtggatggtgtggaagccacgaccggtccactgggacagggattagggatggcggtgggcatggccctggctgaacggcaactagcggctcagttctccgagtcaccgcagttggtggatcactatacttatgcgttagtcggtgatggtgatttgatggaaggcgtctcccacgaagctgccagctttgccggtaatcaacaattgcaaaaattaattgtattgtacgacgataacgctgtttcgcttgatggccccaccagccggtcgtttcgtaccgatgtgaaccagcgcttcgctagttatggttgggatacacaaacggtaggtgatggcaatgatttaacggcgattaatgccgccattgagcgtgccaaacacagttcacgtccaagcctgatcgctgttaaaacgacgattggatttggcgcaccacaagcgggtacgaatgcggtgcatggcaatccgttgggaacggccggtttaactagtttgcggcaacaattagggtggcaagccgcgccatttacggtgatgccggccgttgctaaacgcgcacagcaactaatcttgcaacgtggtcagcgtacacatcgccggtggcagtcacaacgagaggctttaccacaagccgtgcaacaccgtttcgaacaacagctcagtatgcgtctgccagttgacttagccaccagtttaccgatctttgatgaaggcgcccaagcttcgcggatcacgagtcataccgtcattcagaagctagccgctcagttaccaggattagtcgggggcgcggctgatttagccagttcgaataaaacgaccattgagcaggatcaattgtcgactccggtgaccccggatcagcgcaacgttgcctttggtgtccgggagtttggtatgggcaccattttgaatgggatgactttacacggtggcttgcgggtctttggtggcaccttccttgtcttttccgattacacgcgtgcggctattcgattggcggcgatgatgaagttaccagtcacttacgttttcacgcatgactcgattgcagtcggcgaggacggtccgactcatcagccaattgaacagctaatgagtttacgattgattccgaatctaacggtgatccggcccgctgacccaaatgaaacggtcgcagcttggtggcaagccatcaacgcgacggatcatccaaccgtgctcgtcttgacccgtcagaatttggcagtgctatccggatctaagactaaggccatgactggtgtggctcgtggcggttatgttctctcaccgcagcgtggccgccagccaatgggaatcttgattgcaagcgggtcagaagttgctttagctcttcaggcccaggcgaaactagctacgttaggtgaagatgtcagtgtcgtttcaatgccgtcgatggaaaactttgcgcgccaatcaacgaattaccaagctcaggtcttgccacctcaaattcggcggcgagttgcagtcgaaatgggcgcaacatctggctgggaacgttacgttgggttagatggggcggtactaggcttggaccactttggcgccagtggagcggccgaccaagtattagccgctaaccagttcacggtagcagacctagtgcggacgtatcaacaaacgcacgtggatcttggtcaacaattgcgagtcatttagaaaggaagttagttaaagcatgattgatggacaaacggcactctttggatttatcgcgcaccccgcgcggcacagtcgctcaccgcgaatgcataatttgagttttgactactgggggctaaatgcgcgctacttggcgtttgatgtggcaccggatggattggctgatacgcttgctggaattcgtagcatgggtatcgcgggggtgaacctttcaatgccattcaaacaagccgttataccgctactagatggtttgacagtgcgagcgcaacggattcaagcggtcaatacgattaagaatgaagctggcaagctgattggtgacagcacggacggcgctggagtttttcaggatctcttacatcaaggtctgaacttggttgataagcacgtcatggttttaggcgcgggaggcgcaggtaaggcaatcattgcggcggctttagattatggtgtcgcgagtgtaacggtctttaaacgcaacaacgaacgctacgccggtgttcagcactggttggagcaactcagtaccacgacttcggtaccactccggctctgtgcctatgaagaccaagtacggatgcagcaagttgctcgtaccagcgatttgatcattaacgcgaccaatatcggcatgacgactgctggaacgccattaccaatctcaattatccagcaattagtcccacaacagacggtctatgatgtgatttaccaaccgcttgaaacgacttttttgcgcttagcgcgtcagcaggggtgcgccacatataatggcttggggatgttaatttggcaaggtgccttggcttttgagttttggactggtaagcagatgccagttcaacaggtccgccaagatatgttagccagcattcaagcgactccgccgattacggcgcgggcttaggccttaacttttgagaattgattagtaggaggaaattattatgattattatattaaaaccagcaaccgctacggccatgcaggcaaagttagtgagtcaatttggtgcggatcacgagatcttcacgcacaataatcgaattgcaattcaaggattgcgtccagaagcacttcccacggatgtgcaagcagccagtgaatcaatcttgacggcagttcccgcagcggtccaaagcagccgtctctttcacccagaagatacgattattaagacgccacacagtgtgattggcggtaatcaattcgtcatgatggctggcccgtgttcagtcgaaagcgctgaacacgtggaccagatggccgcggttgccaagcagggtggtgcgacgattgttcgtggcggagcattcaagccacggacgtccccttacagcttccaaggcctcggggagacgggactccaatacttacggacggcggctgataaacatggccttgatatgattaccgaagtgatggatgatgaacacgtggcgatggtggcgaaatacacggatatttttcaaattggtgcacgcaatatgcaaaatttctcgttgcttaaagccgttggacagacccaaattccggttgcattaaagcgaggaatgtcggcaacaatcgacgatgtgctcaatgcagctgaatacattgcagctggtggtaatcatcagatcatgcttttggagcgggaaattcgaacgtttgataataagtacacacgcaacacgtttgacttaggtgcagtgccagtcttgcaatcgttgacacattacccagtcatcgttgatccgagtcacgcggtcggtacctgggaactcgtgaccccgatggcgatggcaggtgtagcagctggcgccagtggcatgatcgttgaaattcatgaccagccaacgcaagctttatccgatgggccgcaagcgttaaaacccgcgacgtacttaaaaatggcgcaacaggctttccagttacatgacctgatgcaaacgtgggcgtaggatgtgcctatgacaaacattgaagtcaagacgcgagttaaacagtatcagatcaagatcatgattgacagtttacatcatctaggaacgttggtaactaaggtatggtgtgcccgtcaagtagcggtggtaacggataccaatgtgggcccgtactatgcgaagctggtaactgatgaactgacggcggctggattcaaggtgcgtgtgatgacggttccagccggtgaggcgagcaaaagttggtcacaagtccagtcgttaatcgatcagctgagtgccgcccattttagccgcagtgacggtgtcatcgctcttggtggcggggtggttggtgacttagcagggtttgtcgcttcgatttatatgcgcggtattgccttgattcaagtaccgacatcattattagcgcaagtcgatagttcggtgggcggtaagaccgcgattgacttaccaactggcaaaaacttagtgggcagtttttaccaaccagatttagtcgtcattgatccggcaattctggtgacgttaccgccgcggatgctcgcagaaggttatggcgaaatcgttaagtgcgcagcattagttggcggtgatttttggcaatccttgcaacaaattaccagtgtggcagcgattttaccagcagcaccagatttaattgcagctagtgtggcgttcaaagcgcgcgtcgttatggcggatgaacatgaacagggtcagcggcaattattgaattttggtcatacgattggtcacgcagtcgaactattggctgacggtcaactaatgcatggggaagcggtagcgattggtctagtacaggtttgtcggttgtttgcagcacatgggttagcgccgactagtttaacgtcgacgctcaaggcacgcttaatggcggtagggttgcccacggaattaccgccgatagcgccgcaagccgtggccgcagtgatgcaacacgacaaaaaagtgcacggtacagcgctgacctgggtctacttatcggcggttgggcaaccccacctgtatcccatagcggtcacggacttggcgacttggatgggtgacttgtggtcggtgtcgtgattagacgtaagtttacaatatgcttcagttcgacacatgacggttagccgggtgggatctgaaaatttgagggagcatcagaacttttgacgtccaggttctgatggacttacatggtagattaacaatcggctttccaagtaatagttggaaagccgattgttattggttagggcgtgatgtttgtatgatcaagtcgttagtcaggagtaagttcacattgtgcgcgttaattttcatgaagcatgcattaaaatatgccagtcttgagtttaaaaagccagtttagggtcaccggcaaaagttctgatttgcgtaaacttgctcggctagatcgtccttcccccagaaatgggcactcagcccggagtcgggaaatacgtgaatgagtgtctgaacctgtcaaatggtatagttgaaaaacaactagcttaccaatagcctaaaagtttcatccagagtgtgccaccaacgccccatactaatagatagaaaccaccaaggcacagattcagacgccaccattcggactgcgttatgtaacctgatccgaacataatcgaggcgggaccgttggcgtaatgggtggtcgaactgaaaatggcaccgtcaaagcctaatagtagggctgctagcattgggggggcgccggctgaaattgccacacccaagaaggcgccgtacatggcggagacgtgagcagtggcgccggcaaacaggtagtggctgtaaaagtaaacgagcatcaaagctgccaagacccatagccaactgattccttgcagggcctggcccatagtttgtgaaagccatggaataaagccaagactgttcagtttgccagccataaaaataagaattgaaaaccaaacgagtgtgttccaagccccagtttcatgtaataagtcgtcaacggataatacaccggttaataagagcaaagtgacggctatgaaggccactaaggtcgcgtctagcccagtgagactagctgagatccaaagaaagagggccaacataaaaataccgcccatgagtttttcggccaaagtcatggcccccatctgctcaagttcgttggcagcccacgcatgcgcgttgggtgtatccttaatttctggcggatagagccaataaataatagctggaacgctaattaagcaaataagaccaggtaatagagcggcgagtaaccagtccatccatgtgatgtgaatctgcattgcttgggccaaggccacggcaacgagatttggtgccatcgcggtcatgaataagccactggtggcaatattaccatggaaagctgacataatgagaaaactaccaaccttacgctgcgtaccgttttgtgggtcagagccgtatgctttagctaaagattcaataattgggaagacgattccaccggcgcgggcggtattgctaggcgtggccggactagtgacgagatcgacaccaatcagcgcgtaggctaatccaagggcctttttaccaaataatttgacgaagaccagcgcgactcgtcgccctagccccgtttttacgaagcctcgtgataggaagtaagccattgcaatcatccaaaccgtgttatcaccaaagccggccatggcatccgtcatcgaggtaacaccaagtaagacaccaagtgtgagaccaataattgcgacaccggcaataggtaacggctgggtaatgcaaccaatgatagtgccaacaaagagagccagcatgtgccatgctaatagactgagccccgcgggacgaaatggcgcgctcagccaaataatcaaaccaattatcagcggccatgtaagttgctggtagttgacggattgtaatttggtcatcgaaaacgaccacctttctagtcaaacgttaaaatcgtctcacggtgactgctgaaactagtcagcaaatgatgctaatccggacacgatttctaaattagaattaatgcaaccctaatgtcatttttgctgcccgtgacattttatcaagcgaccaggtcggttcccagacaaggttgatgagtacctgatcgatacccgcgacggtcattaatgcgcttttgatatggtcattcaaatagcctgtcagtggacagcccatgatggtcagtgtcatggtaacggtgcagagctttaggtcagcatcgtaagcaacatcgtagatcaaaccgaggtcaacaatgttcacaccaagttcaggatcgatcacggtactcagagcggctaaagcttgggtttttaaagtagattgtgtatccatactaatcatgagaaagactcctttagaccaacagcctaagcagggtgatccgcttaggctgttaatggtcggttatttaatgaatttaacttgttcgttgatttttttaatctcagcttctttacgttcgttgaagatgaccttgttcttttcaaacaagttgtcgccattcgtatcgatggagacaattaacggaccgaagtctttgacctcacacgcccagagtgtttcgggcattccgaggtctttccactgggcatcaacaatcttattgacgtgcagggcggcataaacagcattgccagcggggtagacgaggtgtaaggcgtgatatttcttgcaggcccgttcggttcccggtcccatgccgcctttaccaacgattagtttgacacgggtttgttttacgaattcttcttcaaatttttccatccgcatactagtcgttggcccgactgcgatcatttcgtacttgtcatggccgagatctttaatgatcgggccagcgtggagaattgctcggtctgtcacgttaacgggtaggggacgatgttcttcgacgagccgccgatgggcaacgtcccgacaggttgttagtgagccattcaagtagacgatgtcgccgatacgaatgtccttaatatcgtcatcagaaattggggtggttaagtggtaagttttcatgataattcgactcctttgttcagtggtaagtcatagtttagatctgcgtcaaagttgataagtccgcgccggtgtgaccagcagccggtactaacagcgacgccaattgttgatgggtgtcgggcggtattctcgacattgacacccattactgacttttgaccgccaaacccctgtggtcccaggccaatgtgattgatgccgtcttctaataagtgttcgagtttggcagcattagcgtttggattttcactatcgacgcgccgcattaaagctaatttagaattaagcgcagccgtttcaacggatgtggcgacgccgacaccgacgagtaaaggtgggcaagcgttaatgccgtagctcgtcatgcgatccatcacgaaacggacgacgccttcgtaaccttcaccaggcatcaggactttggcagccccgggtaatgtgcagccaccgccggccatgtacacgtacattgagatgtcagtgccattaccatcaacttgcagaaaaatcgaggggatgccgtcaccaatgttcataccggtattgtattcgtcaaatgtctgaacagcattatgtcggagtggcgctttttttgtcccacgataaacggcgtctttcaaaatttgattgagttcgcctaatagtgggaactgcgcgccgcatttaatgaagaattgtaatgcaccggtatcttggcaacttgggcgtttaagtttattggcaagtaattggttttccatcatcgtgtcgtagacgagcttttggagtggatcgacttcgatcttactgagttcttcgagtttggcagtcacatcatctggtagtcgatgactgatgagtgcaatataatcggccaaaatgtcgcgcatccgttggcccttagttgataacgttggttcggtatagtcgtatgtcattgtatccatagctggtttcctcctatcaatttacagctacattgtaagtaactgtgtgatacaaaactaaccgctactcgccaagttatgccaggtatcagattgtgaaagtgatggtaagcggacaggtagccggttaaaaatgacaaaaaaataccaaggccttctgacgagtgatgccgtcgtaccttggtatgacccaatatttgatcaaaatatcggtaagttcagttgttcgtaatcacaaaaattgttatgccgttaattattgattgagcagtgtttttaattgcgcgattttttgtttgagcgcctgatattcttgaaaatgtagtttatacatgcaactttcacaagcactgagttgatcagtacttgtgagttgggcccagtgcttgagttgcttttggacaatggtagtttgtgtgggagtgagcggttgcttgaactggtcatattcaggacgctgcccgtgtgacaagtgttgacggtaactggaaggtgtctgaccaaaatgcttcttaaacattagattaaaggacttgacctcctgaaacccattggctaaagctagatcggcgacccttgtggttgggttttccagatcgtagatggcgtgttatagtcggcagcgggttagatattcgtaaaaattcaggccgagttccgctttgaagatgcgtgagagataggctggtgaatagtgactgatttttgccgcttcgtttaaggtaattggtcgatcgtaagcctggttaatgtaatcaatgacccggtttagtgaactctgcgtcttgggttgggggtaagtcatcgtgattccagtatcaaagaaatcgtgatgtagcaggttcgtcaattgaaagtacagggcgttcaagtcaaaaattggccagtcctgctgatgtaatcctagatagagttgtgccaggatttggcgaatcgtttggtagtcacggtgttggggcgtcgtcacgctgttgagtagaaaagcacctgaactgaggtcgatgccctgattagtgtagaagtcgggcagaatatgtaaacggagcgcgatacattctggggtcaaggcaaaggtggcatggccgcgattggcattgatcaagatgaggtcatttgcgtgtaattgatggcgagtcccgtcaacattcacttcgacggtacctttcaataaccataagagttcgatttgcggatgccagttgtagtggtaactaccaatcatgtatgttaataagtcaaattggacggttggagtggattgaaaatgctgactaggtatcatgacagggtcctccttaggaataactttgattagctctagcttacacgttcagaagatgcttgaacagcagtcgacaaaagaatacaaaaaaaaatgacaaaaattgactagtatcagttatgatggaaatataagtaatggtaactgaatgttggttgtggtcacgcttaatcaagactgaaagtgacccaggcacatcatcgttgttagactaaggatgaaatggtggagaaatagtggatacgaagataattgtcaatcatgcgctacgagcgcttttatacgaagtgacggtcaaccctaagcccgggctggtcgacccgttgtcggcgggtccccatccagacatgaacgcttttatgtttattgatagtgctttgagtctagccccctactttaatgcttgtgcagcggcgggcgtcgcgtatacggctgtcgatttgacgggtttgttcaagcaaattcggggcagtggtgttcaagcggaacaaaccatgtttgcggcgaccaagggcgtgaatacccataaaggggcggtgttctcactgggcgtgctagtgacagcggcggcgtatcagttgcagcaccccgacgtcgacttagcaacgattgtgcgcacgatgctggcggggttaacggcaaatgattttaatgaattaaacacgaaggatccaacgaccttaactgctggagaacgtcaatacttaacatatggcatcaagggaattcgtggtgaagccgaggcgggttatccgaccgtgatgcaagtggcactacccgcattgagacgtagtcgtggcacgattaatcagcggttattagacacactgatggcgattgtccaggcgacggtcgataccaatctggtaaaacgggcacacgacccacacgtcattgactgggtccacgaccaagcacaccgctacttcgatttagggggaagccgcagtgaagctggaatggcgtttttacgcgaattgaatcagatttttgtcgaccataactatagtttaggtggctcggccgatttgttgattttgacgatttttattggattgcagacagatatattagcttaataatgagtgtcgtgattgtaggtgacgacacttttttaataccaaatattaatggaaattaaatgacgattgcaatgcttagttgatgagtggtcagtgctttttagtggtgatggcatcgaaagtcgtttcagtaggttctggattaagcttttagtatgttggttgtaacgccttggttaagcagaaatagtattagaatgaacgaaaatttaataccaattataaaaaagttaactgcacctaacaattatttgcgttagcgttaattatcagttatgcttatgacgatgtagaaaaccgactaccgcgatgaacggaggaaatgtgatgttaaaagtacaaaacctcaccgtggcatacagtgacacaccagtctttactgatgttgccgttaactttaacgccggcaaaattactggaatcattggtcccaacggtgcgggaaaatcaacgatgatcaaggcaatgcttggtctgatcaaatcccaaacgggaaccgtcgaatatgaaggtcgtgcgctaaaacaatttcaaaaacagattgcatatgtcgagcaacgtaaagatctcgacttaacctttccaatcaatgtttttgacgtcgttttgactgggacctatggcaaactcggacttttccgcgaaccaagcaaggcggatcgtcagcgttgccaagatgcacttgagcaacttgagttagccgatttagcacagcgccaaattagtcagctctctggaggacaattacaacgggtctttgtggctcgagccttagtccaagaagccgatatcattattcttgatgaacctttcgtcggcattgatttacagagtgagacggctatcatgacgatcttgcatcagtggcgtgatgccggcaaaatgattattgtcgtgcatcatgatttgaacaaagtttcacgttactttgatgatctcgtgattttaaatcacggtatcgttgattatggtcccgtggacgcggtctacacacccgcaaacattgaacggacgtttagtgctgatctttcggccgtcctgtttacgaaggaggaaacgcgatgatgcaatcaattacgacctttatggctgctttggggaagtatgatttcttacaaagtgcgctaattacggctattatggtcggggtcatgtcaggaattattggtagctttattattttacgaggcatgtcgatgatgggcgatgccatctcgcatgccgttttacctggtgttgcggtagcttatatgctcggtatcaacgtcctaattggtgcttcggtttttggaattctagccgctagcttgattggattcgttgcgagccgtagtaagattaagactgacacctcaattgggattgtcttcagtgcgttttacgcactcggttttatcctaatttcattagctgaaagttcgacgaacttgcaccacatcttattcggtaacatccttgctgtgagtgatactgatatgatgacgacgacggtcgtgttaggactagtgattttattcgtggtcttcttctacaaggaattactgattacgtcatttgatccgacctttgcgaagacttatggtctcaaggtccaactgttacattacgcgttaatgctggtcttaacgctagtgaccgtttcagcgctacaaaccgtcgggatcattttagtggtcgcgatgttgattacaccggctgcgacggcctttctatggacagaacgactggcagtcatgcttggactgtcagccttaattggggtcttgtcctcagtggtgggcttatatctcagctacacgttgaactgggcttctggtccggccatcgtgctagtagcggctattttcttcggtatttctttcatcatctcacctaagcaggccttgttgccgacgctttggaaagggcaagcagcagcgcgacgggtgacagcatgaaaacgaaattaattgcactgattggagtcatcgcgatggttaccgggatggcagtatttctgaatcaacgccagcaaagtgccaaagcgacgaccactagtgccaaaatccgggtcgtaagtacgaactcgattctagatgatatggtgaaaaatgtgggtgggcagtacgtccaaaattacagtattgtgaagcgcggcactgacccgcatgagtatgaaccacggcccactgatattgcggcaactgccgaagctgacgtgattttttataatggcttaaaccttgaaactggcggtaatggctggtttaaaaagttagtgacggcttccaaaaaggactttgaccacgatgtttttgcggccagtaagggaattaaggtcaaatatttaacgacgaacgttaatgagccggacccccatgcttggttagatctcgccaacgggattcaatatgtcaagaacatcaaccggacgttgcaggccaaggatcctaagcacgccgctgtttatcaaaagaatacggatcgctacgtggcaaaactaacaaaactgcatgagagcgctcaaaccaaattcaagcagatcccgacgagtcaacgattattagtgacatccgaaggcgcctttaagtatttctcggcggcctaccatgtgcccgctgcttatatttgggaagtgaatacggaatcgcaaggcacgccagctcagatgcggacggcgttgaagaaaattgaaggaacccaggttcgaagtttgtttgtcgaatcatccgtatcaccgaaatcgatgaataagctttcacaggagacgggaatccccgttgctagtacgatttttaccgattcgctggcagctaaaggcaagccgggtgatacgtactactcaatgttgaagtggaatcttgataagatttatgctgggctgactcggtcgtagtacttgggcctataattcggttgtgttgatgtcatgtgatataagtttgttctaaaaaggaccgtggaagttaaatcttccacggtcctttctttattttgaactgctagtttagtcttccgattcgaatgacaattccgtcattgatagttccagatcatcaagtacgtcgttttcactcagaaattgttcccaggcagccggtgtttgttcgcgggtatgggggacgattttatcatgaatattggcaatcacatcatcgagcatcttatccgcttgccgggcgatttcagcatcgttatagcggcgtgctggcgcccggtcctcattttttcgattcagaaaatcggttgctttctccataaaaatggtaataacttgggagttgtttgcgagatagtcttttaaagtttcattatccaatgtattagtcctctctagtttgagtcgtacttctaatataccacgctaatcaggttttaactgtttcaagatcggttggcgggtaaaaagttttgtaacttgcgcagatgtttcgaattgacgccaatcaggcaatttaaacgcagaattgtaaccgcttacgaaaatgatttcacaagctgacactttagaaaaagttcacaatcaaaataattttaaatgctgctacacaggcgttttaagtaataattatatttaaatttttcaaaaaaataatttatttttaaaaaattagcaaaaatgaaagcatttgcgttataatacttgtgagttaagtaactaagtagttggaaccacatgtgcagcacacatttttgatgaaagaaggatattgacatggataagaagcaacgcaaagtcgtaattgttggtgatggctcggtgggttcatcatttgccttttcattggtccaaaattgcgccctagatgaactcgttatcgttgacttggttaaaacgcacgcagagggggacgttaaggatttggaagatgttgccgcctttacgaatgcgaccaacattcataccggtgaatatgcggatgcgcatgatgctgacatcgttgtcattacggctggtgtgcctcgtaagcctggtgagagtcgtttagatttgattaaccgcaatacgaagattctggaatccatcgtcaaaccagtggttgcgagtggttttaatggttgcttcgttatctcaagtaatcccgtcgatattttgacttcgatgacgcaacgtttatccggttttccacggcatcgggtcattggtaccgggacttccttggatacggcgcggttacgggtcgccttggctcagaagttgaatgttgccaccactgcaattgatgctgcggtacttggagaacatggtgatagttccatcgttaattttgatgaaattatgatcaatgctcagcccttaaagacggtcacaacggtcgatgatcagttcaaagctgaaatcgagcaagctgttcgtggtaaaggtggtcaaatcattagtcagaagggggccacgttctatggggtcgccgttagtttgatgcaaatctgccgagcaattttgaacgatgaaaatgctgagttgattgtctccgccgctttgtctggtcaatatggcattaacgatttgtacttggggtcacccgccattattaaccgcaacgggctccaaaaagtgatcgaagctgagctatcagatgatgagcgtgcccggatgcaacatttcgcagccaagatgctgaccatgatgaatgtggcatcataaaaatgatgagtaagtatgaggaggaattgagatgacactaaataaggtcaagtatcgtgattttattgcaccgttattggtgggcctgatcatttggttaagtagtcctatcaaaccagccagtgtttcgatgaacgcatggcatattctggcaatttttgtggcaaccattattggttgtattacgcggccgttaccaatcgccggggtcgcaatcattgggttgacactaaccgtgttattgggcatcgtgcctatggatacagcggttgccggatttgggagcagtacggtatggatgattgcgatggcgtattttatgtcacgtggtttcatcaatactggtttaggtcgacgtgtcgcgttggtgtttgtgcggctgtttgggaaacgaacgttgggtttggcatacgcactgattggcgtcgatttagtaacagcacccgcaacgccaagtaatacggcccgtgctggtgggattgtttatccaatcattcagtcgttagctgaaacgtttggttctgatcccaaggatggcacacaaagtaaaatcggttcattcttagtgttcgcagaatttcacggtgatttaatcaccagtacgatgttcatgacggcgatggcgcctaacttagttgctgtcacgttagccaagagtttacacatcacgttatcgtggatgcaatggttcttagccgggattgtcccaggacttatttgtttattggttgtgccatatttaatttataaaatgtatccaccagaaattaaagatacgcccaatgccaagcaatgggcggatgatgagctggcaaagatgggtaagatgagtcttccagaaaaaatcatgggcggcgtcttcttgctagccttagtcttatggatgttatccagctttatcggtctcgaagcttcattagttgcctttatggccgtctccttgctactcgttgctggagttctatcggtagatgacgtgctacacgaaactggtgcttggaataccttggtgtggttctcaattttgatcttcatggctaatgagttgaacaaactcggctttattccatggttgtctggcgcgattggtggtgccttgaaaggcttcagttggggcattgttttagcggcactcgtcttgttctacttctacagtcactacttgtttgctagtgggactgcccacgtttccgcaatgtacggtgccttacttggggtcgcggtttccgcgggagcgccagcaacctttgctgcactgatacttggctttactggttcgatcttcgcttcgacgacgcattatgcgaacggcccggcgagtgttctcttcggttctgggtatgttactcagggaaaatggtggcaattaaactttattttaggtctcttctacctagtcgtttggggtggcattggcgctctctggatgaaagtgattggtatttggtagtctgattttaagcataaaaacaggtaccaagctgccggcaacggtcagcgttggtacctgttttcgaagaagcggattatttggatagtggtgtggcttgatcttcttggagaacccgattcgcgacggcttcatcaatgatgatgtcagtgagtaattgtccgcggagggcgccaagtaaggcttcgctcttgaacttacttttgatgatgccgaaacgacgcggcactttgagaatggcgggcattttagcgccaaagagtttgtcgtggtcggcgttcagaatgtgaccattgatgtcgtatggccgaccgtataacaggccgaccaccgcctgcggatcagcgccacccagaatggcttggcgatgttgatgccagacgggaatcgagtcaatggatgctaaggtgccaattccggcaaatagcatgtccattcggtcaaagttactgatggccggtgtaatggctggttcttgagccaatgcttggtgtgcttgatcattaaacaagtagagtggtgccgggatggtgacgtactgtgcgccgaacttagcggcggctttttgaaccaacggtgttgagccgttcgctgcgttcgttttcaggttatcacccataaactgggtgaacagtaagtcatcacgagtgctcgtttgaaaattatcgatgacgctaaggacagtgccaccccatgccaccccaattacattactttgaatgatctggcgctggattgtttcggcggcaaactcgattacgtggcgttcatcgtcactcgtggtatccgcgtctttgataatataaatatgttcaattggaaaacgatgtttaaatttagcctccagctcactatttcgttcgatgggggtgttaatgttaattttgactaggccggttgccatggcttcgtctaagtattttgaaattagataacgactgacttggtatttctttgaaatttcagcgatgttgattttggataagtaataatcatgtgcaattccaatcaacaggcggcgatgattcatatcgtccatatcgatgacctctttatcaacctaagatttaaaattttaaaactcgtttataatattttaagtttattataccagaaaagctgactttttaaaaattataaaaatccaatctaaatttgatatttttaaaaaatggtcgtacactggggataacaaagtgaacggtattattttgagaagagaaggcagatattgatggtagaacaagatgagattttaaagttgcacgccgcccatacgggggttttggacattcattcagaccttgcagtgaccgataaggctgatttaggtaaagcatatacacctggtgttgcggtgatttccaagctgattgcggcgcatccggaattaaaggcaaaatacacgatgagtggtaaattagtagcgttgatcacggatgggtcagcagtactgggcctcggcaatattggtcccgcgggtggtttgccggtcgtagaaggtaaggcactcctatacaagaacctcgcagggattaatgcgattccgctggcgttaaatcaggtcagcgtgccagcaatggtggcgacaatcaaaaacatgtcgctctcatttgcgggcattcatctggaagatattacggcgcctaagtgttttgaactagaagcggccttgaaagatgagcttgatattccggtttatcatgacgatcaggaaggcaccgcaattgtcgtgttggcgggactgatcaatgccgctcacgtagtcggtaagtccttacggcagatgcgcatcgttgtcaacggcgtcggcgcatccgggttagctacagctcggttattagcagcggtcggtgtcaaacaactgaccttggtcgatgtttacggggtcgttacagcggatgatcagcggtacaaccagtatcaacggaatcttgccaaacagttgggaacacctgcacaactaaaggggcaaccactggcgaaggtcatggccgaccaggacgtcttcattggcttgtcagacgccaacgtcttatcagcaggggccgtccacttgatgaatcatgatccaatcgtctttgcactcgctaatccagtgccagaaatcaatccagcagtagctgagaaggctggggccacagtcattgcaacgggttctagccagtatccaaaccaggtcaataatattctggcttttccggggctcttcaagggcttactcacaaatggggtcaagcaagttgataatgcgttacagatccaagtggctcaggctttggctaagaccgtgtcgaacccaactgcgacgacgattgtgccgagcgtctttgattcacaagtggtaccgaacgtgacggcggccgttgcagcgtacgcgcaagcacagcattaatcataggaggttgtctgatggcagcgcaagttgttgaaatgcaattaaataatccgcacgagcatgcccagtggcgacaattcttaacgtcattagggattactaattttagcccgcaagaggttgaacatattgatgtgaccttaggattgatcgaggatggccaacttgttgggaccggatcgttagcgggcaacgtgcttaaatatgtgggtgtctgtaataagaatagtcagccgggggcccggtttaatcaaatcgtgagtgcactggtcaatcggctgtttcaagcacagatctttcatatgatggtatttaccaaggccaagtattcagcgagttttcaacacgtaggctttaaagaattagctcattcggatgaagcggccgtattagaaaacggcgcaccggatatgacggattttgtcaaacagttgccgatgattcccaaccaagcacaacagcgtgtcagcgcgattgttatgaatgcgaacccgtttacgcggggacaccgctatttagtggaacaagccgcggcggtcagtgatttagtttacgtcttcgtcgttgcgacagatgcgagtctattccgtacggccgagcgcgttaagctggttcaacaaggaacagccgatttggccaacgttcgggtcgtcagcgggcaggactatctcgtgagtgcagcgacctttccagcctacttcttggattcagcggcgagcgcaattgaagcgcagacgacgttggacgcccggatctttaagcagcaacttgcaccagcactgcacattacgacccggttcgttggtagtgaaccgacgtcgcggacgactgcgatttataaccgagttttgcagcgtgaattaccaccggcagttgctgtacgagtgatatcgcgaacgacggtggctaatcaaccaatttcggcgcggactgttcggcaacggattcaaagcggcaacttaactgagttaaaccaactggtaccggcaacaacggcccagtttataaaaaataacctaacaacattacaagcgcgaattcagaaaggaatgaaaattgatggaaattaagacaacggcagtcgccggaaccttggaatcatctgatattcaaattatgttaatggcgggagacaacggcattcaaatcgaccttgaatcggatgttatcaaacagttcggggcacaaatcaagcacgtgatcacgacgacgcttcaacaattgaatatcgataatgtgaaggtgcgcgctgttgataaaggggcgttggactgcgtcattaaagcgcggaccattacggcagcacaacgggcgttagaaaccacgacaccagcatgggaggtattataatggctgaaaatgaagaacgcttacggcggacaatgatgtttgtacctggtaataatccagccatggtaaaggatgccgggatttacggtgcagactcgatcatgtttgacttggaagatgccgtctcaatggctgaaaaggatgcggcccgggtgctggtttacgaagcgttaaaaacgcaagattatggcaacgctgaattggtcgttcgaatcaatggtttggataccaagtattacgctgatgatgtcaaagcaatggtcaaggctggcattgatgttatccgtttgccaaaagtcgaatcggctaccatgatccaaacgttggaaaaggatgtcgcggcagctgaagctgaatttaagataccagttggcacgactcatttgatggctgcaattgaaagcgctaagggcgtgcttaatgccccggcaatcgcggcagcctcggatcgaatgattgggatcgccttgtcagcagaagattatacgacggacatgaagacccaccgttatcctgatggcgcggaactggaatttgcccgtaacatggtgcttcatgctgctcgtgccgctggaatcgccgcgttcgatacggtctttacaaacatggccgatcccgatggcttctaccgtgagacgcggcatattcatcaattaggatttgacggtaaatcattggtcaaccctcgacagattgcaatggtcaattcagtctatgaaccaaccaaggatgaagttattaaggcccaaaaagtcatcgccgcgattgaggaagcccggatcaagggttctggtgttatttccatgaatggccaaatggtagaccggcccgttgttttgcgggctcaacgtgtgatgagcttagccaaagtttccaacttactcgacgaggagggcaattacattgaaaaatagtgtagaccgcgaattaccagcagaattaatgacgaagttaaattaccaaggttttgagtcaaccgaaatcggacatcctgaaattcaacgggtggcccccaaagttcacgtttcaacaggggacaacaaagtcgttgattccgttgctgacgtggtaaaagccactgtcaaagatggtatgacgatttcatttcaccaccattttcgtaatggggatttcgtcttcaatcaagtgatgcgggccattattgatgccggtattaaagatttgaccttggcgccatcctccttaacgggcgtgatgaacgatatggtgatcgaagcaattaaggccggaacgattacgaatattactagctcggggatgcggggctctcttggggacttcgtttcacacggtggtttaaagaaccccgtaatcttccgttctcatggtaatcgggcccgggccattgaacatggtgatattaaaattgatgtcgcctttctaggtgtgccgaatgctgaccgactaggaaatgcgaacgggatggctggtaaagcagtctttggttccttaggttacgccctgatggatgcgcaatacgccaaccaagttgtcttattgaccgataatattgtggcttatccaaatacaccggcctcaattaaacagacacaagtcgattacgtcgtgcaagtcgaccaagttggtgaccctgacaagattggttcaggtgcgacgcgcttcaccaaggacccaaaggaattgaagattgcccagaccgttaatgatgtgatcgtgaactcaccatactttaaaaacggcttctcattccaaactggttccggcggtgctgcgttagctgtcactcggtacttgcggcaagcaatgctcgataatcaaatcaaagcatcgtttgcacttggtggtattacgaaaccaaccactgatttgctcgaagaagggttagttgataaagtcatggatgttcaagactttgacaaaggggcggcagcatcgatgcacgccaatcctaatcaacaagaaattgacgcatcatggtacgctgaccctgataataaaggagcgatggttgatcaattggatgttgccattctgagtgcgttggaaattgatacgcacttcaatgtcaacgtcatgtccggttcggatggcgtgattcgtggcgccattggtggacatcaagacgcggctacggccaaactgaccattatctctgcaccacttgtccgtggtcggttagcgacgattgtgccagaagtaacaaccgttgtaacgccgggggactccattgacgttgttgtgacggaatacgggattgcaatcaacccgcggcgtcaagacctagttaaagcactcagtcatgtcccaggcgtgccggtctatacgattgaagaattacaacaattagccgaaaagaaagtcggccaaccccaaccacttgaatttacagatcgcaccgttgccttgattgaatatcgcgatggcacgattattgatacgattaaagcggtgaaggactaaagtatactgatgacaaaaatgaccttgcttggcaaattgctagctaggtcattttttgtatgacgaattgtcaaatcaagcgcaactttgtcccgaagaaaacttcaaatggactcttccagcctaagaccttacgtggtcggtgatttaaatccctgacaaacttgtcgatatcttgatcagtcagttggtctaggtcggttcctttggggaaatactcacggataagtccgttggtattctcattggttcccccgttgctgaggcgcatgaggatctgggaaatagactgggatacttagctcttgactaacttcgcggtatcctgcgaattcagttccacgatccggcgtaagcgtccgaactcgtttgggcgtcacggtatgcaagaggtcaatcatcgcttgtgtgacgttcttggcgtttactttgggaacccgctgagataataaataccgagatttgcggtccaccaaggttaccagggccgaacgcccggttttaccgcgaacggtatcactttcccaatgaccaaaccagcttcgattctcacatgaaacaggtcgttcatgaacggaagggacgtcgttaaatcgtccccgacgttccttaatggttcccttgacctttcgggttttaccacggtgacggagcttacgggcaaagccatgagcctcgtgattcttacgtttgatgcctaaattatcacgttcaatcccacgataaatggtgttataactgacatgccattcactgttttcgtggactaaacgaccggaaatttgttccggggaccactgacgttgaacaatacagtgaagaacaaaatcccgtaacttcaaatcagttagaagcctaggacgtcggctttttagtcgccgtccctgatagttctcttgggctttgacggccgagtatgccttacgaccaccattgcgcttgatttcgcgcgatacggtggctttggaacacccaattttctccgcaataacttgataggtattgtttaaagtgacgcccaacagtatgcattctcggtcttttaaggtaagatggttgtacggactcatagcctaggatctcctttagatgattgttgtggtgacttcattttataggactcaggctatgagttcttttttatttttttcttacttgttgcacttcaattgtaaattcgtcattaacaacatgtgtggcgcttgttcgcatcgaggtttatggggaaaaataataaactaagacggttaatcccaagttttaacttaaattcagttgtactacgctaaatttatttttgtgaataaatcgggggaagttataagtgatagtattagtgaatttaggttacaagaataggaaaatcttggtagaccagattgacaatgttattagcccccatgcgcgtaagtattgagcacatttttttgctttttcgtattgttgcaataccattgctaaacggatcttactcaataatagtaaatcataccggtgagcgtgtttggttaactcgatacttttttgtaaatagttaattgttatgcttttaccgaatgcattggagttggtcatgttaatgaatgctaaattagaataaatagcattttgtagtaaaacattattatctccatactggttaagtttagtaataattttttcccaattcttagtgcagtttggaagtcaaaaatatatagtaaattattaataataaaaaggtctgtatgattccagatacttaccgtagacaattcgttccagacaggtttgacaaggttagtaagttgatcgcaattgtacgtatcaacgtgtataagagcatctaaaacacaaattatataatggatatagcgtaacgtcgatttttcttccagctgtcgagcctttttcaaaatagatttcatttttttaacttcagaagtatctgagatactttcaaactcatttagtgtattttcaagttttgatggtttttcagaaagtataggtgaaatacatgcacaggcagccaagtataagagagttgcacctaagcctaagggaaaatggaaacttaggaaaaaattcaaaaaaactgttaaaataacaaaaaagttaaagaagtctgggtctgcagcaatcatgacttacgtagtacaggcgcttgcgtccaaatatggcggacaagcaatttggatgttcgggggtacattttttgggagctattttcctgcaggaaatacttatttaactgcgtgggcgtataagcgcgctaacaagtatgtagtacaatataaaacagttattcatatttatacgaataaatctaggaaacacattcgtaaaaaggcttcacgtattcagtcgtttgtaaagaaatataaggtggttagggtggattaattatggatcaatacccaaattttaagctatttattgataaatatttaccatggctagccgttattggctttgttgtgacagttagtgttaatggcaatgtttggttgtattttatgtcggtgctgattgtatttgttgtgattgcaattattgacttgctgtttaagtattggaaccacgccaaaattttaggtatcatgattgttcttttagtacttggactatggttgaatcgctaagaaaataccaggattagtgtctgacgcggcattttcaatggatttataaagaggcattgtgcttttctgaaatgccatggctagcatcaataaggggcttctgtcaaccagtgtcgatgaagttatatctagaatccaattcatttatgaattggattcttttttgaagtgcgcccggcatgggtgataactaggcggtgtaagtccgctgtgggccgtagtagtcggaaccacgagttgagggcaagggcgttcgccgtgagacggagtctgaaggaagcctaagacaaaataccgaaccgatgtacaagaagtggctacaaggctgattagactggatgaagttgcttcacaaactgaagtcctacactacttgaagtcgaagttagtaaagccaacggttgcatggtatgaaagctatcattcttacccggggaggcctgtcggataagctcccaacaaggacgccgatatgggtttacaggagtaaactagtcagccgaggtcatagtaatctgccgtatggcagatgaaggactgaacaataataattctcaccgatactggaggtgttggtagtgcgaagattgcagaaaacagaacaagctgaccgccaagggatgaatagtctggaagacaaagagtatcttggggcgcatagtactactaacggtgaaagtacggcgcaggatggcattcaatttgtagaccgggtccttccttgcaagtagtaatctgaacctagcgtttaagcgtgttcggaggaataagggcgtagctggaattgacggcatgaccgttgaccaactggccgaatatatttacaagaaccgggaagaactcctagagagtttacgtaatggaatatatcggccgcaaccagtcagacgggtagagataccaaaactcgatggctcaaccagaaaactgggagtacctacagttgttgatcgtatgatccaataagctgtggtacaggtgctttcgccgatatacgaacaagtattttccgacaatagctatggattccgaccaggtcggagtgcgcatgacgcgattcaaagtgtcaccgaactctacaatcaaggctaccactatgtggtagacctcgatttaaaggcatactttgatacggttaaccacgacttactaatgaacttcatcaaacaacgagtaactgatccatggctactccacctaattcggcgcttcctaacaagctgggtcatgaatggcgagctgtttcgaaagacgacgaagggaacaccacaaggtgggaacctgtcgccgctactggccaatatttatctcaacgagttggacaagctattgacccagcggggccaccgatttgtgcgctatgccgatgactgtaatatttatgccagaagtaagcgagcgggagaacgagtcttacgcaatgtcacaatctttcttgaaattaagttgaaactaacaattaactgtcataaaacgacggttggctcaccactccgactaaagtttctaggatttacgctcggtgtagaccgtaatggggcatatgcacgaccgcacaaggtcgtgaaacagcgaatcaaacaagcccttaagataatgactgggcgaagtcgtggaattagttggttaatgttgatgaagaaaattaaacagaaaatgcgaggatggctacagtactatgggattggcaagatgaagacgtttattcaacaactggaccaatggttgcgaagtaggattagacagttgatatggaaacggtggaagaaaatcaaaacccgatatcgtgagctaattaagctaggaatgacaccggaacaggccaagactaatgccaatacccgcaagggatattggcgaattgcccataataaaacactaacctatacgtatacaaatcaaaagctggagcgtcttggactaataaacctgtccaagacactccagcaaatacagagtgcttaaattattgaaccgccgtatacggaaccgtacgtacggtggtgtgagaggtcggtaattgaaataatcaattacctcctactcgattgcaaccgaatttgataaaaaagttttactagttaaccatacgtcgttcttttgatttgcctgatttcatctcttttcaactatgactcgatattttgtggtttggtatatttaggtctacaaataagaaaaagtgacaattatgagtaaaattaagcaagaggaataaataagaacatgtgaaaaaataaacatttttatctagaactcattctaagcaatctttgtatgctaatatactgatacataaacctcataactaatacttatagctaaaactgagtttgactatagctatatgggggcgctaaactaggattataaactaaatgttatttttttcacacacttagtaagcgcttaccaacacattaattggaggttatcaacatgacagaatatcgagttgaatcagatactttaggcgaagttaaaattcctgcgaacgccttatggggtgctcagacagaacggagtcgccataactttccgactggtacgaagatgccgttggaaatgattcgggcattacttcaaattaagcgggccgcagcgattgcgaataaagaagttgaagcaatgactgctgaaaaagctgatttaatcgtggctgccattgataagttattagcgctcgacgatgaagatttgcgtaaggactttccgctggttgtttaccaaactggttcggggacgcaaacgaatatgaacgttaatgaagtggtcgcacacatggctggtaagatcaatcctgatattgaaatcttgccgaacgacgatgttaaccatggtcaaagctctaacgatatcttcccaacggcgatgaacattacggccgcagttgctgtggataagctgattgccgcagcggaacacttattagcggaattgaagatcaaacaaaagaagtactggcgggtagtaaagatcggccggacccatcttcaagatgcaacgccattaacttttggccaagaagtgagtggttgggccagtgcgattgaacatgatattgcctacttaaaacagttgaatccaacgttaggcgagcttgcaatgggtgggaccgccgttgggactggtctaaatgctgcccctcattttgctgaaaatattgctgcggcgatgagcaaattgtatgggattgaatttacggctgattccaataagttctatggtttggcccatcattctggcttaaacgtggttcacggggccatcaagaccctagcagccgatttgatgaagattgccaatgatgtgcggttcttggcaagcggtccacgggccggttatgacgaattaaacattccggctaacgaacccggctcatcaatcatgcctgggaaagttaacccaacccaagctgaagccatcactatggcagcggtacgagttatggggaatgacgtggtcgtcgatttagcttctagccaaggtaattttgaaatgaacgtttacaagaccgttttgattgatgccttccttgaatctgctgaattgttagctggaacgattaccggcttcactgaccgaatgattgctggtttgacggtcaaccaagaccggatggcagagttagtcgacagttccttgatgacggttacggcattgtcaccacatattggctatcatgatagtgcgatgattgctcaagcagctgaaaaagcggggacgacattgcgtgaagcagccatcaagtctggcaaagtaaccgcggaacaattcgatgaatggatggttccactggatatgacgaatattgatgattaagctaaaataagtattgatcggcgttgaaccgttaacgtggatcaaggtggcacgggtcattgttcctagacttggaatggtggcccgtgtccagttaacgacaataataaatgagattttggttccatcctggggaataccccggacgaattgagaggagaagtggcaatcaatggctgaaaagtttacatttacaccaaccgccttagcggatctaaaaccgaactatgacgtagtgattattggatcggggggcgcgggtttgactgcggcaatccaggcacatgaattgggcctgaacccggttattttagaaaaaatgtcgaaaatcggtggtaacaccacccgggcttcatccggtatgaatgcggcggagacgaacgtccaattgcatcaccatattgttgatagttttggcgatttctacggcgaaacccttaaaggtggtggcggtatgaataaccaagcactgttgaaattcttcacggaacacagtgcgctcgcaattgactggttagcagaccacggcattaagttggatgatttgacgattactggtgggatgagtgtgatgcggacccatcggccaagttccatggctcccattggtggtttcttagtcactgagttgttgaaacaagtggcggctgaccagttaccactcttcacagatgtcaaagtcgatgaactagtcgtcgaagccggcaaaattagtggcgtcaaggcaacaaccccagatggagctgtcacgattacggctggagccgtcttgttagcaaccggtggcttcggtgcgaataagaccttgttaggccagtatcgtgatgatcttaaaaactatcagacgaccaatcagccgggcgcgactggagatgggattctgttggcacaagctattggggctaagttggttgatatggaccaagtccaagttcatccgacggtccaacaagatacagatcatgcttatttaatcggtgaagcggttcggggcgaaggtgcgattttggtcgataaccagggggctcgtttcgtcaatgaactcgacacgcgtaagaacgtgacggccgctatcgaccaactgggtggtactggtgcctacttgatctttgaccgcggtattcgtgaccgggtcaaagcggttgaattctatgatcacattggcctggtaaagactgggactgacttggaaacactggcgactgcgaccggcttagacgctgcgacgcttaaacagacggtggctgactggaatcaggcagtcgctaaccataatgatgcggcctttaaccggacgactgggatggatcgcgatattgcggcgggaccgttctactcaattcacattgcgccagctgttcactacacgatgggtgggattgccattaatcccgcaacccaagtgttgaatcaggacgaacgaccgattgccggcctgtttgcagccggtgaagtggtcggcggtctccacggcaataaccggattggtggtaattcaatcgctgaaacggtaatctttggccgtcaagccggacaacaaatgttcaaatatttacaataagttattttgactaacccaaatcaatagtccatgcgcttgagtaatcggtgcatgggctatttttgatttgggctgtagttagagaccaaagaaattagtttaaaaatcaactaatttcggttaagctggaaatataacaaatatataggaagaaagtgacaagcatggcgacgatttttacaaccggtgaaccgcaaacaatcacggcaatgctagcagcccgtgatcaacgggtcgcgtatcagcaacagttgacaacgactaacccccgggccacgattgcggcgatcaagttgaatatcccaggaccgattaagaataacgctgcactacgacggttgtttttggccggtgtccagcggtttgaagctgagttgtcgacatacacggtggcagctgattggaatcatccggcgggtaatgagcggttcttgattctgacgactgactttgcgactagcaaacggctggcggtcgcttttgaagaacacgatccgttaggtcgcttatatgatattgacatcttacaagcgggttcacagcgcgcgctgtcgcggacggatttggggctgccgaagcgtcgttgcttattatgtcaccgtgaagccaaggattgcgcgcgttcacggcggcattcagtggctgagctacagcaaaagattgcggcgatgtacatgaaggaatttggtgaacgcggatgaatacacgtgatttagattattttcgggcgttagttgattgccaaaattatacgatggtcgccaagcagtttgcggtctcacaaccggcagtgactcaagcaattcatcggttggaaaaagagtttgcagtcaaactggtgattcaagaccgtcgccatcaacagacaaatattacccgggccggtcagctgctttacaagaatgcacgccagatccaggccagtttgcaacttgctcatcgcgaaattcagagtacgttacagactgatattcgttttggcttaccaccaattattggcactttatatttccctcaaattgcggaaaagttacttcagaacgggttactgcaacagttaaaaataacggaaacgggctcagatgagctattgcgtaagttagtgcatggtgagatcaacatcgcgttattagggtcctacttaccatttgatttgccgacagttcgtgcggttcacttaggggcacggccattcagtattatcgtgagtcctcaaaatagtttggcgaaacaagccgccgttagttttaagaatctcggtcaggcacagttcattggattggatggcaaatacgtgcacccacaagccttccgagcctattgtgactttgccggggtacatccagaagttatctaccggacccccgatatctcatgggtcaaagccttagttaaagccaacttgggcattagcttactggttcgtgatgtggttaaagcggatgatggcgtcgtatgtttggagatcaaagatcaattgccggtcagcttcaatatctcggtggtcacacgggccgggtacttaccaaccactgatgaacaacggtttattgatcaattacttaaaatgaagatttaaacgtcgcgactgagccatctgtctaagtgaacagcacgattccttgagtggttcaacttttactttgagattgacgtgtcttcacgattgtttcatttggatatatcgcaatttgtcttgattacgaaaactgcaccaccctcacagactattctgtaagggtggtgcagttttgcttaatcggtctgatcagtgtcaaccgctaatgtttcgtgcaaaatggtcagtagctgttgctgcacgggggtcagaatatgggttgttcggtagacgatgcttgtgatgaattcagggggttcaatgtccatcaagtccagtcgtacgacgtcagtacggtagtgatcgacaattttggtaaagaaaccgatgccgacattttcaccaatcaatttcattaaaacgtgggtatcgttggaacgaaagacgatgttggggcgaaagtgattccggcgcgtgagtttgttgaaggccgtattatggatgaaattactattaaagaaaacaaatttttcacgtcgtagttcgttaaagtagacccgtttacgttgtgctaacggatgttgcttggacacgtagatacagaagggctgacggtcaaattcttcggcaatcaacgtttggtaagcgagcggctccaccgaaccaagcagggtcatgtcaacgcgaccgtcccgcacagcgttacgtagccagatcgagcccccctcaatggtttcgagaccggctaatagcccttccgcggccaatcgggcaccgatttttggaaaataatggttttcaataattggcggtaatcctaaaatcagtcgattttgggatagattgtcgatttcttggtgggcgaggcgtaactcatgtaaaacgattttagcgtgttcagcaagttgcgccccactagcagtgacgtgtaacgtatttttaacacggtcacgaatcacgagtggtgccccgaattcagactccaggcgtttgattgcggtggtcacagttggttggctcacaccgaatgttttcgcaacttttgaaaaatttttttgagaaattaattcatcgaaataagctaagtcttttgtgttcatttttattcctttctaaatcagcttttgtagcgaccttatttaatatatttatatcatatcatagttttgactataacattttactggcgttacagtattacttgtaaattgataggacgtttttcctagcaatgaaaattgatgaaaatgtaaattaattaggaggccgcagtaatgacaaaaactgcaagtgaaattttaaataacccattcttaaataaaggcactgcctttaccaaagaggaacgtcaagcacttggcttgacggggacgttaccaagcaaggttcaaacaattgatgaacaggcgacgcaagcttatgcccaattcaagagcaagcctagtcgtttggaacaacggattttcttaatgaatctctttaacgaaaaccggacgttgttcttccatctgatggatgaacacgtggttgaatttatgccaatcgtttatgatccggtcgttgctgattccatcgaacagtataatgaattgttcttggatccacagaatgcggccttcgtttccgtcgatgcacctgaagatattgaagcaactttgaagaatgccgcggacggccgtgatattcgcttagtcgttgtgacggatgctgaagggattcttggtatgggtgactggggtgtcaacggtgttgatatcgccattggtaaattaatggtttacaccgccgccgctggtattgacccatcacaagtactgccagttagcatcgatgctgggacgaacaaccagaagttattagatgatccattgtatcttggtaaccgtcacaagcgtgtgtccggcgaacaatactatgacgtgatcgacaagttcgttgctgctgaacaacaattattcccagattcattgttacactttgaagatttcggtcgcgacaatgcgcaagtaatcttggacaagtacaaggatcaaatcgcaacctttaacgatgatatccaaggaaccgggatggttgttttagctggtatcttaggtgcattgaacatttcaaaggaaagcatcaaggaccaaaaaatcttatcatttggtgccggaacggccggtatgggaattgccaaccaaatcttggatgaattgatgcaagctggtttaacagaagaagaagctaagcaacacttctacgctgttgataagcaaggtttactatttgacgacacggaaggtttaaccccagcccaaaaagccttcacgcgcaaacggagtgaatttagcaacgctgacgaattaaccaacttggaagccgttgttaaagccgttcacccaaccgttatgattgggacatcgactcagcctggtacctttactgaaagcatcatcaaggaaatggcggcgcacacggaacggccaatcatcttcccactttctaacccaaccaagttagcagaagctaaagcggaagatttaatcaaatggacggatggccgggccttagttgccacaggtatcccagctgatgacgttgattacaagggtgttacttaccaaatcggtcaaggaaacaacgccttgatgtaccctggtttaggatttggtttgattgcttccacagccaaagtgttgaacgctgaaaccttgtcagcggcctgccacgcattaggtggaatcgttgatacgtcgaagccaggtgccgcagtcttgccaccagttgcgaagattactgaattttcacaaaaattagctgaagtcgtggcacaaagtgttatcgatcagaagctcaacaaagaaccaattgcggatgctaaacaagcggttgctgatatgaagtgggtcccagaataccgttccatcagcaaatagtgtcggtaaaataagagaattgtaagagggtataaaagcacatgggagttttatggaattcaattcaaagcgtcttagttgtcgttttgattatgatattaggtttcgtcctacgacgagcaggttggtttgatgataagtttgctggaacgatttccaaatttattaagaacatcgctttgccagcatcgatttttgtatctgtgctgagccgacttactcgtgggcagctaggatcatttgcaggttacttggcttacgcctttctagccgtgattattggctacttgattgcctttgcgctagttaaggtgatgcgggtccgtccgggtcgtaaggggattttcatcaatgcgatcgtcaacgccaacacgattttcattgggttacctttgaacattgcgttgttcggtgacaagagtatgacgtatttccttgtttactatattgtgaacaccgtttcgacgtgggcattcggggtcttcttgatttcaaacgacgacccgacgaagtccaaggaaaagacgcataacaagatcgactggaagaaagttattccaatgccattggttggtttcttagttgcgttaattttcttactactaaatatcccaatcatgaaggtatcattcgttagttcaacgttgacttacgttgggaacttggtaacgccactttccttgatctacatcgggatcgtgttggccgacgctggtctgaagagtattcgtttcgaccgtgatacgatcgttgcgttgattggtcgcttcatcttgtcaccagtcatcatgattcttgtcttgatggttgctggtaacctcggtgctagcttcccaaccttagcatcgcaaacattgatcgttcaatcagcaacgccaatgctagccgtgttaccaatcttggctaacgaagcacatggtgacgtggaatacgccactaacatcgtgacaacgagtaccgtgttgttcatcgtggttgtgccagtcttgatgaccttgatccaatatatttaaagtttatttagaagcattccggttgagagagacggaatgcttctttttttgatcaaaactgcttgagttgaacccgattaaaatatgttaaaggtcaaaattaaggtcgatcagtcgaattctttcagctgaccgaccttaattttttgcgaaaggagtgcttgaagatacaagcttgtggcgattgcatttaaacagatgaatatgatagaaacaaatttaagtcgggacgtatgactgtgggactggtcagctcggttttcagcggcgattaacaaaagttggttaagtcgtaacccataataatgcggttaaattaaaattagtgaatcttatggattattaataaatttgtttaaaataaccaatgctgtaaagtgctgccttgaaaggattcaattaggaattgattgaaattgttagatttacttgactaattgcacaaaaattaatagaattaacaacgttgcattattaagattttgattaggaggcgtaccggatgaaagcatcacaacgattgctggttaaaaaatcagtcaatccagctaattttaataagggtggcctcgaaaagacgttgagcgcatttagtttaaccatgatgggtgttggcgcaatcgtgggttctgggatttttatcacccccggaattatcgccgctaagtatgccggtccggctgccatgctctcatttgtgattgctgcggtagtgtgttcgctggccgcattatgttacgctgaattttcttcaaccattcccttggcggggagtgcctatacttacgtttataccgtttttggggaattcttagcgtggattcttggttggtctctgatctcagaatatttattcgcggtatcttcggtggcggtaagttggtcatcgtactttcagaatttaatgagcggctttggcctaaaactaccaacatttctgaccgccgcagctggtactgccggtgtcagtggtgctggattcaacttaattgcttttgtcgtggttttggctgtctcactgttattggtcggtgggttacaagagtcaacacgggtcaattcaattatggtaatcgttaagattctagtgattgttcttttcattggcgtggcaattttctttgtgaaacctgccaattatcatccgttcatgccccatggtgttagcggactggtcaaaggcgcgtcgttagcattctacgcgtatattgggtttgatgcggtgtcgactgcttcagaagaagtgaaaaatcctaagcgtaatatgccaatcggaattgtcggttcgttagtcgtagcatcgattttatacgtggcaatggccgccgttctggtcggggtcgtgcattacagtaagcttaacgtgggtgatcccgtggcgtatgccttagccgtcattcatcaaaactgggcggcggggattgtgtcactgggtgccgttgtcggtatgacgaccgttttgattgtcatgttatatggtgggacccggttactgtttgcgattagccgggatgggttgttaccgaaagtctttcggacggtcagtccccataccaaagtgccagttaagagtacttggatttttggcattattgccagtgtatttgcggctgtgattccattagataaaattgcggagttagtcaatattggaacgctatttgcattcgctatggtgtctatcggtgttgtcttcctgcgtcgacacgaaacgctacaacaaatcaatagttcatttaaagtaccattttatccagtgttaccagttgtctcgttcctcgcatgtgtctacctgatgcttaatttgcaggcatttacgtggcatatgtttggtatttggctggttattggcatcgtgatttactttgcctatagttatcggcactcccgtattcgagcagggttacgtgccaaagaatcaaaatcgtaattaatagtgggtgcttaccggggcgggtaagcacccattcttttcgcggctactaagcttggggatatgctataattaagcgcataattcataaggtaaagagagttgaggtggctgatgatgcagagacgttcaaacgcctatcatatcagtgtattagcggtactaatggcaatcgtgatcattcagaatattgttccgttttttgggtacattccattaccaggattgagtattacgacaattcacgtgacggttatcctggccgccgtggtcttgggaccgcgtgatggggcaattattgggggcgcatggggaattattgcgtggatacgggcgttcgtcgcaccgacgagtcccttagcaccaatcgtatttaccaatccattgatttcggtgataccccggattctcgtcggtttgatagccggttgggtctttatttggtttcagaagcggcatcaaaaagtgttggggatgacgctggcgggcgtggccggggcattaacgaacacgattctagtcttaggtttgattgggctactctatagtcatcaagcagccggcttttatcaagttaatttgagcaaactaatgccgtacttgttaacgatcgtggcctcgaatgggattccggaagcgattttagctggaattctcacaccactgatcgggacaccattactacgttttaaaaaataagtcgctaaagtgacagctagcttgaatcaattcaaatttaaaacagccacccttgaaatctcctgaatttcaagggtggctgttttaaatcgctatttaacggcttgaacttgtttctgactaataattactttgttgtgatacttatcaacgatggctggatcaggacttgtaaaggtgattaaatacgaattagtgtaacttttcgcaatggtcccggtataagtctgcccttccaaaatgaacgtcacttgtgttccaatatccatgatgatgcctcttttcgcacgatagttttattaaggataacacaccagtggacgtaacaggtaaaagttcactaattaaaacgtcgccgaacttgggcccaaatccccgttgctagggctaagagactggtacccagcgttgcgagccatgactgagttgtttcgtcggtctgcgggagctcagttgtggctttggatgatggtgaggagacggcaactaagtcggcactgtcagtattagttgttgtggcagataccgtggctggcgtcgtcacacttgtttcctggtcactataatcttgaagcagactagccgtgacggccgaaccgctgtcatcgtgattaactaaccagtcagtgttagtcatggcggttgaactgaccataattgaatcactgacttggcccttaatcacgctgctctgatcgatagtgcttgtctggttcacagtggtcgtcgcacgtgttgcgtcaaccgccgtgtcggaatcactatccactgcgttatccgtgtcgttcaagtcaacgtaactagtcgttgaatcatcattaggtttcgcatgattggtcgtgtctggtgttgtatcactagttatgttggtagtgtcagtggtcgtgttatccacgatagtttgatggtcgctgatggcctcatcagccgtcgtttcatcggtaacattgtcctgtgctgtggaatcggtcgttgtaccgttgtcagccgctccctgattacgattatccgttacttgatcaacatcaactgcttcatcttcagcatccgctacggatagcaatggtgttaagaaagctaacaagtgttggcggtattgtaggatcgcgttattagccgcagcgtgaccaccgacagtccctggtaagatccaaacttcttggttggcagaatgattggcggccgctaattccaatgattgagtatatggaatgaaggcgtcgtcttgcgtgtggatcaagagtaacgggatagtgattttgctagctgcatcggttgctgataagtcatcgacactgaaaccttgttccttgatcaaacgagcgttcatcgcggccacgattttatcataggataagaagggcaggctcgtgatggctggcagaccaacggattgaagtgcgtttgaaacggcggtgatggctttgctgtatagcgaactacctagttctggtaaggtcgcgtacccggcgtccgacacaactgctttaacggattttgaaagtccaggaactgaggctgcttctaacacggtgtcggcacctaatgattgaccataaaagacgacttgactgtcggcgccattgcgttcgtcgaccatcttaacccaattcagccagtcatacttgtcctgataaccaaacgttaagttatcaccgtcacttaggaactgcccacgttgactcggcatgaggacgttataacccatgtcataccaaatttttgaaacgtagccgatccaatcaacatgttccgtccaaccttggccgatgatgacggtcttggtggaatcaccattttgaatatagtaagcacggacagactgcgtcgggtcattgtattcaggcagggtccaggtttctttggtaacgttatcccaccaagtaaccgttgtcgggtaatattcttcggccgcagcccggtcagcagcataagcgactggatcgaggccggtccacgtattggagatgtcatagcggtgctggttcatttcagtacgtaaattagatagggcttctgagccagttcccgtgaagacgattgggtagagtacattacccacgatcgtgctggcgatatctgtggggagctctttcaactcgtcaagaattgtcgtcagtttggctttggctgctgctaattgttcttttccagacggggtcgctgcttgatttgctaagtccttgatcgtattaacgacggccacaatatcactggcatctaacgtgaccgtggtggtgtccgtcttatcagaggtagtaacttttttccaggtcacactgtaagggccactttgtgtaatggtgaccgtactcttttgattgccagtcgtgtcgttggtttcgtagattaagccatgaccgctgtcacttgtcgcggcactagccgcgctggtcgtcgccacactagttggcgttgccgcagcggtcgaattggtgttggtactcgtatcatcagttgaatcaatagctgaatcggtcgttgatttagtcgtggctgtcaccatatccgtgacttgagtagcgtcactcgtcgctgagctagcggcctgttcgttaccacttatggtattggctgccgtcgaattagtagcgctggtcgtctgactagttactgtgccactcgcactgttagcaacctcactagcttggtcggtagctgacgctgcacttgtggcttgttcagtcgcgctagtctcagtagcgttagtactagtcgtaatttgattggtgtcagtggtagcgctgctgtcggtatttgacgtggtattactgtcttcaccagtagtcatgctacttgtcgtggttgactcggttgccgttgccccggcggcttggctgagttgactggcaacgctagctggggcgttggccgcagaagtggtcgtggcactaacgggggtagccgttgctgctaaggcgttagtcgtcagcattaacgtactaccgagccccgcaatggtaatccccgcgtaaacccaatgtttgccatctttgaacattttataatgatcaacggtggttgattgttgtgaattccttttcattatatttactcctcgtaacgttttattctattgcacgttttaaaatatagcacgacaacccaggcttgtttgcgttttcgcgggctaaacttgttaaatgaggtacttttttaataacggcatcagttgtttattgtatgaactaatttgttaactgattgagtacgatgattgatttttatgatgcgacaagctcagttattcgcgggagtcacgcgtgattttaccagcagatgccagattgcaaaatgtgaacttacaaacgaataagcgtactaatagtggccttgaaaattagcggctttgactattttgggaataaaagttgagattgattgaaatttcacttatcacttgctattatgaaaggtgaataaagtgtttccgctttcgtagggaataaattaataaaggggggaccattatgaatctcggattaagtattttatccttggcgcgctttcagttcgcgatgaccacggtgtttcatttcttctttgtgccattatcaatcggcttagccttggttgttgccatcatggaaacggtgtatgttgtcaaaaaagacatcatgtacaagcacatggcacaattttggggccgcattttcttacttagctttgccgttggtgtcgtgacagggattatacaagaattccaatttgggatgaactggtctgattattcacggtttatgggtgacatttttggggcgccactagcgattgaagcgttagttgccttctttatggaatccacgtttattgggttatggatgtttggttgggatcggtttaatgccaagctccactgtgcgtttatctggctaacgtcgattgggacgatgatttccgcgatgtggattttagcagcgaacagtttcatgcaaaatccagttggtttcatgatcaataccaagactggtcgtgcacagatgacgagctttgcagcagtcgtcaagaacgaacagctctggtatgaattaccacatgtgttgtttggggcgtttgttaccggctcatttgtggttgctgggatggcggcgtttgcgttactcaaaaagaaaaacgtcacgttcttccgcaaatcgatcaaggtcagtttaatcgttggcctggttgcttccatcggtgtgattggaatgggagatttacagacgcgttacatcattaaagaacaaccgatgaagtttgccgcaacggaaggcttatataaggattccggctcgccagcttcatgggcagttattgaagggatggatactaagaaccataaggccaactggtcgattgaaatcccgtatgtgttggatattttaagctatcataagttgtccggtaatgtgaagggacaaaatacccttaacaaggaacttcatgccaagtatgacaagaaatttggtaaggacatgaactactacgtgccaacaaagacgcttttctggagcttccgggtcatgacggtagctggtgggctcttcgcactgattgccattatcggtctatacttcaaccgtgcaaagtcaacgctgattgagcggcagcgctggttcctgtgggtactaggaatctgtacgttcttaccattcgccgcaaacacggccgggtggctgattactgaattaggtcgttatccatgggttgtttatggtttactgacgattgcagatgccgtttcaccaaatgttagtgtcgcttcgttgctgatctctaacatcgtgtacttctgcttgttcagtggcttaggcattgtcatgatcgtcttatcacggcgtgccttacaccaaggccctgatgatttgttacaagctagcgatgacgcaccgtacgatccttatggtaaggaggcgttcagtcatgagtaatctacaattcttatggtttattctggtgggcgttctatttagtggtttcttcttccttgaaggttttgacttcggggttgggatgacgattaagagcttagcccaaacacgcgctgagcgcgatgttgtgattcatacgattggcccacattgggatgccaatgaagtgtggttgatcactgctggtggggcgatgtttgcgtcgttcccaatgtggtatgcttccttattctccggattctatcttatcttattgttgattctagtggccctcattatgcgaggggtctcatttgaatttagaagccggatggaaagtgacgccggccggaatttctgggaatgggccgcagccctaggtagtttctttgctgccttcctatttgggatgatgtttactgctttggtcaaagggatgccaatcaatgccaatggcgatatgactgcccacttcaccgattacgtgaacttgttctcaatcgttggtggggttgccgtaacgttactctgctatttgcacgggttaaactttattcgtctgaagacgaccgggacgttgcgtgaacgggcgcttcagtgggccaaaccgttatactgggtcctgtttgccggtgaagttgtcttcgcaattctgctgttctttaacaccgatttctttaccaagaaaccaatctcaaccacgattttagtggtcgccttagtggctttgacggtcttggcaacttggggtgtttatggaaatcatgaatggctctcatttattagcagtggtctctcactgatcgacgtggtcgtgctcctgttcaatggactattcccacgtgtcatggtggcgaacaattctgcatacagcattctgattaaagatgcgtctaattcaccatatacgttgcatctgatgactgtaatctcattatcggtattaccgattatgttgatctactttatttggagttactgggtcttctataaacggttggcatcgtaattcaaatgcagatgacgacagtatcactggtgcggtggtacaattaatttaacagcaccaacggggtcgcgaccttggccaagtgccagggtgcgaccccgttcattttaagtagggagtgatcgaatgtgtttgatccggcattatttaaactaccagggatgcgccgagcagccacgattttagggttattggccatcgtcgagggtatttgtattgtctttcaggcctactatctatcagtggcgattgttggactgtggcacttgcattcattagcgtcgatcagtcagcccatgctatggttcgcattagcttgggtcggacggcagttactggtcgtcattaaaaatcgtgtgatgtacccgttagtcgaacagacgacgggtgacttgcggcgtaaagtgatgcagaagttataccaactcggcccaagttatgtagctaagactgggactggtaacgtggtgacgacagcgcttgaaggtatcgataaagttcagacatacttaatgttggttgtgattaaagtaatcgacatgatggttatcccgtggatcattttaatttacatcgcgtggttgcgctggcgtgaggccctttttctactggcaatttttccattaattattctatttatgattattttgggctatgccgctcaagctaaagcggataagcagtacgtgggctatcaacggatgtctaatcacttcgttgatacactgcgcggtttaccgaccttgaagcagttaggactgagcaaacggtacgctgacaacgtttatcaggttagtgaaggttatcgtaagcaaacgatggcggtcatcaagattgcgatgttatcgactttcgccttggatttcttcacgaccttatcgattgcggttgtcgcggtcttccttggttttggtttgattaacggcacgattacgttgctaccagcgttggttattttggtcttatcgccagactatttcttgccattacgaacatttgctaatgattatcatgccactttaaatggcaagaatgcgtttgcggatgtccagaagatgctagctttgccggtgccaactgaacgtcaacagctcggtactcagcctgtgcaatggcaaagtgatagtacgttaagcttacatgacgttgattttaagtatgatgatgatcagctggccttaaaacacattaatattgatgtgcatggttaccaacggatcgggattattggggcatccggctccggcaaatcaactttgatcaatttgttaggtggctttctaaccccggtcgctgatcagggtaaaattcaagtcaacgggcaaacagtctcgcatttgagccaggacgcctggcagcagagctttttctacattccgcaaaacccatatctgttccatgcaacgttagcagagaacatcgctttttatcagccagacgcttcacgtcaagcgattgaacgagctgctgaaaacgctggattaacggcctggattgcaacgttaccagcggggttggatacggcgattggtgaaggctcccgtggtgtcagtggtggtcaggcgcaacggattgctttggcgcgggcctttcttgacgactcgcggcgagttctgttatttgatgaaccaactgcccacttggatattgaaactgaagcggaactgaaaacgacgattttacccgtacttgataatcacttagttttctttgcgactcaccggttacactggattaatcagatggattacgtgttagtgatggatcatggggaaatcgttgaacaagggacaccgacggaattggccgcgcatgacggggcgtacgttcggttacgtgatgaaatggtaggtgcgatctaatgaaagattttttggcaacttttaaaaatgatacttgggtcatgccgtatttgcgcaagtataaaaagttactagccctgacgctgtttttgggtctaatgacatttttctgcggttcagcgctgatgttcaactcgggctacttgatcagtaaagccgcacgacacccgtataatattctgatgatttatgtgccaatcgttctaacgagagcgtttgggattggtcggcctgcctttcgctatgcggagcgaattacgagtcataactgggtgctacggatcgtgtcagattttcgtaagaaactgtaccaatccgtcgccaagcacgccgtagcgattcgccaaaatttccagactggtgatgtcctgagcattttagctgacgatattgaccatattgaaaatttatatttacggaccgtttttccaacggtgattgcctggttgatgacgctagtgattgtgattggtctgggctactttagctggtggttcgggctattgatgttgttgatgttaggattggtcgttgtgataatgccgctatggtcggtcttactgaatggtgctcgtgaatcacgcagtcgtcagattcaacagggcttttatacgcagctgactgattcggtaatggggctcggtgattggttgattgccggacgtcaaacggatttctatgagcggcaaacccagcctatcgaagcaattgcggcacttcgtaaacaggaccatcgctttcagtggtggcgagattttacgattcagatcattttcggggtgatttgtttggcgctcttgatctggagtagtttttactggacaacgaatgcggctagttccaattggattgcggcgtttgtcctctccgtattcccgttggtcgatgccatgcagtctgttagtcagggtgttagtgagtggccaagttatcaacggtcaatcaaacgagtcaacgccttagacaccacgcctgaagatgaacacgatcagacagtcttaacggagccatttcaagtattgcgtattgcggaccttgactttaaatatgcggaaggtggtcacgcgatttttgacggtttgaatctgactttaaaagccggtgaaaagttagccctgctaggaccttccggaacgggaaagagtaccttgctcaagctgattttaggtgacctgacaccggatagtgggacggttcaattgaatgatgtgcccatcacacggttacaaaatgagcgcgcccagttattcggcgtcttggatcagcagccatacttgttcaataccacgattatgaacaatgtgcggatgggtaacttgcaagcgactgacgaacaagttaaagccgcactagcagcagtcgagttagcgcccttgatcgacacgctccccgatggttacgagacagttgtagaagagggcggtgcgcgcttttctggtggcgaacgacaacggctcgcgttagctcgcatcttattacaagatgcgcccatcatcattttagatgaaccgacagttagtcttgatccgattaccgaggcccatttgctgaccacggtgttccgggtcttgcatgataagacgattctgtgggtcacgcaccatttggccggggtcaaccatgtcgatcaagttcgcttcttggaagatggtcaattcgatatggccggtacgccgagcgaattgtacgcgaatgcaccgcggtttaaacgcctttatgatttggatcaagggcgtgatgatgcgaacaatgatcggtaatccggttgatagcagtcttccacgtgcaccttgggcttgtgaaacagacttttaattactgcgctgaatgggtattcagcctacgaatgtagtggtcatgatgaccattactgattacaccgccgatttagagcgtaaaaaggacttggtcgctgtgaccaagtcctttttatatgcaattaatcgccaggttatgatttaacctgttagtaattttgtaattgtgcccgattctgaacgtcgaccacgtaggctttcgtgcctaagcggctgagtaaggtccgtacatcattgtaattgattgagacgcaaccagccgttgcccattgattcttgacgtgaataaagaagcccgagccattatgctgaccgtgattgtccatcacaatcgctaattgatactgattgtggggcgcggccttcgtgtaatcgatcagatgctcgttcttattattggcccagtttcggttctgccaagtgttatattgccggtcatgtggatcttcaatccagtaagatttccggttgatctgtcgataggccataccactagttcttgcactggcagctttaccaaatgcgaagcttaagtgataaacgcctttgggtgtggtactgctgccttcgtgagaattgccgatgccagcggccccgatgcgacttgcggaagttagtgtattcttccagccgcgattggttttttgccaaagtttaagagtggccgtggatgagccattttgaatgaccgtcacgatttgctgagcctttttggacacgcgcattctggagacgagtgttgcttcggatggggtggcagctttggctttaactggctttaagtagccactccaaatccagccagtggccccattcttgctattgtgaacccagtagtaacgaacctttttgccgtgcatgataatatcagtttgctgagtcgttgtccagacggtgttgcgatagttcttcaaatcatgattggccctgaatgtccaacgattataattaccattagccctaaaggtatgtgatttggtatcggtcgtataataggcctttctagccgttgcccgcgttggcgtgcgatgatagtaagtgctggcattcgcagatactgaacttagcattgtgaccgctgcgatcattagtacgctccccagcaaccaattaacaatctttttcatgaaacccctcctagtaaaaatagccccgttattacaatttttatacaaacactataatactatttatctcggcggaatggataacaattttgactaaatcgcggcggtgtagggtgagtaatggttgtagctgaaaaatcagcgcgtcagagtaataggttactttgacgcgctgatttaatttgtgtattaatggttgcgaaccagtaattcagtcactagccggcgtaaagtttgttgtgtttcaccagttggtagctgatcgattaggttcagtgcggttttggtatagtgagtagccaattgttgtgcctgggtaacgccccccaaagcaatgacctgatcgcgaattgtcagtagctgttcattactgatgtggtcgccgggttggggtaattgttcggccaattgtggttcagcggtcagggcgtagataagtggcagtgaataaacgccgtcccgtaagtcattaagcaccggcttttgagttaaggcctcatcaccggcgtagtcaaggacgtcatctaacatctggtaggctaaccccatcctttcaccaatctgttgcgctagtttaacgacgcttgcgtcggcacccgcgaagtgggcaccttgttcacaactgaggctgaacagacgggccgttttgccacgagcaattgctaagtagtcatcgaccgtggtcgtcggatcgaagttatgtgccatttgatccagttcgccttggaggatggctcgcatcgccgcagtattgattttaacgtcgtcagctgtcttggcagcaatcaggacttgatcgaaatagcaggtaaacagcagatcaccggcgtaaatagcattacgttgaccgtagtcttggtggatcgttgtcacatggcggcgttctggcgattcatcaattacatcatcgtgaatcagtgtcgccacgtgtagtagttccatagccgctgcgccagcacgtaaccgggccgtgttatgatccggtccaaattgactaaacaagtaaaagaagcccgggcgtaaaaacttaccacccgcagcgagtaagtcgtgtacgcggtcattaatggcggcgttatcaatttttacgttagtagctagatacggcttcagcgctgctagctcctttgcgacaagactttccggttgccaaatggtttgcatcataatcaaaataccccgctttatttgagagatggctccgggacgttttgacgccaacacttgcagccagtcacattctaaaatacaatctatattaaaggtacaaataacttgtttcgttgtcaaacaaaaggatggtgtaaatcattgaaaccaaaagtgtttcttgaatttgttgaaattaaatcattaattgcgagcgtgttaccgttcgttttggggagtatgtacgcctattataattatcatcagttacatcttggttatttattgctatttttcattgcatcttcactttttcatatggcgactaatgcgaatgataattaccaagacttcctacacgcgccacgtaatgacgacaatcaagaatttttgcaagagactaatgtggtcggtgttaaccagatttccattggtcaggcccggacgattacgtttggtttagccggaatctcattgattatcggactatggttagtaacacaaaccgggttgccgttgttgtggatggggctatattcatatgcggtcggttacttttacgctggcggtccgaagccaatttcacaaggcccgtttggcgaatttttctcgggctttacgatgggctttatgatcttctggattgccgtctttattaatacgtatgacacggcagccattacttggcagtcaacgctggctgttttaattgcgtcaggtctggccatttttgcaatttctaacattatgttagctaataatatttgtgatatggacgaggacattgcgttaggccgacacacgattttgtattaccttggcaaaccggtgatgcttcaggtatttgcatggagttacgttgctggttatgcttgtctggtgattgcggtcttgatgggtgtgctaccaaagtttagtttactaacgttgctcagtattattccagtttggaaaaatacgcgggtcttcttgcacaaacaggtcaaacgagaaactttcacgatttcaattaaaaacgcaacgttgatttgtctttcatttatcgttttcatgggcttaggactgatttttaactagtccttcaataaacgagtatggctttgagaaagcgccaactaaccaagttgatactaagcagtatttttcccagcgagtccaagctggctttctgattttatggcttggggtttttcaatggtatttcacgggggtaaaaaaagcttagatatcgtgtgaaaaaacacacggtatctaagcttttttaatttacataaagatgttatttataactagttttcaaatggatagcggaagtcccattgtgcacgagcggcagtcatgatatccataacgtcagtcgttttagcaagactcgtgttgtgtaattcgccagcaaccattttttgcatgtcagcaatttcgtaattcatggcgttagtgctatcgccggctgtgatggtttcagtatggccttcgctgtcggtgaaagtggcactgtcggcacgtggataggtatcaacggtaaagtaaccattctcatacgcgacgataccgcgtttaggcattttagctcggaacgttaaggcaacggtggccagttcatcattggcgtttcgtaacgtgattgtcgaagattcatcgacgccactgctgaatcggtgcatggttgttccggtaatgtatggtttagcagtcaagaattcttccacgaaggctagggcatagacaccaatgtccagtaaagcaccgccggcaaggtcgggattaaagaagcgattagttgggtctggttctttaaaactaccaaagctagcttggatcattttcagatcaccaagatgacgttctgccgcaaaatcatggagcttctcgtataatggcatgtgatacagggtcatcgcttccgctaagataaggtggttgctagcagccacttccttggcgattgcgagttgggtactagacattgtgatggccttttcactgaggacgtgtttgccagcacgtaaggcgggtaaaatcgtgtcaatgtgataattatggggcgttgccacgtaaacgatgtcgacttgttcatcagccagtagctcgtctaaattaccataagctttgggaatattgtgttcggcagcaaaggcgttagctttatcctgcgaacgtgagcaaacggcgtagatttctccgtcaggttgatcaaaatatttaacgaaactgtgcgcgatgttaccaaggccaacaatggcccagcgataagttttcgacattataggttcctcctaggattaatcgaatgtgaccacttacattttagcaaaaaaataaggaattggcgcccaataatcatgtaaaattaatacaaaagtcggtaaaatagagtgtaatatgaccggtgctcattgcgatttaggcttacttagaattaaaacatgttggttagttggactcttattcgtcagcacgtgtgcgtcttatgccgacttccggggccgggtgacaattactggaacgcagccgatgtcgatttgagctaacgcccaagccgcttcatctcaaatacgagtcttattctaagcacgtttacgctaactcgaactttttacagcgggcctaagctggcagcttttgaactaagaaaccagcatgttttaatcctaattcatgataaatgaacaggtgtaatctgtaaggcaattaccagaaaggaggcggctatgatggcgggtaagcggcgaaaatcgcgccggaagcaacggacaaagacacaattatttgtgaagaagggccgccttcagtgggtcaatatcttattagtgttggcggcgatggtggggatggtttggtatattcagcataattgggcggttaagtcgcgggttacggcgacaacacctacaacaacgcatgcggcatttattaaaaagctagtaccagctgcgcaacagcttgatcagcaataccacgtgctggctagtatcacgctaagtcaggcgattttggaatcggattggggacaaagtaccaatgcgacagagaataataatttatttggggttaagtccacgtcgggacggctcatgacgacgcaggaatattatgacggggcctatcatacggtcaaacggcgcttcgccgtttatgatagctggcacgcttcgctggtcgatcatgccaagaaattggcgtacggaacgacttgggattctcagcactacgctgcggtgattaaggcaactgattatcagacagctgcgcaagcattgcagacggctggatatgcgactgatccaagttatgcacaaaaattaattaatattattcaaaaatatgacttacaacggtatgatagaaagtaatgaaattaatagcagtatttcaatgtcgcttataattctaggagggtactatgcgagaacttgaagaacgcattttgaaagatggccgggtacttcccggtgaagtattgaaagtggacggctttttgaatcaccaagttgatcccgacctgatgtttgccatgggaacggaatttgcccacttgtttcaagatgcgggtgtaacgaaaatcttgacggttgaatcatcaggaattgcgccggcagtcatggcggggttagcaatgcacgtgcccgttgtgttcgcacgtaagcacaaatcagtcacgttaattgatgatttatatacagccgaagtttattcttacacgaagaagacgtctaaccacatctcgattgccaagaagttcttacaggcggatgaccaagtcttgttaattgacgactttttggccaatggtcaggcggttcaagggatgtttgaaatctgtgataaagcgcacgtaaaaattgcgggtgtcggtattgtgattgaaaaagtcttccaaacgggtcatcaactgattgctgatcggggtgtccgtttagaatcactagcacagattacgtcatttgatggtgaccgggtgcactttgcatcggaggacacccaggcttaagttaagaaagcgggggattgtgatgcaaattgacatggggatgctagtccttattttcatcatcaactttgcttacattacgttaaataccgtacgttttttgcttgtaatgcggggttatcggtattttgcagcttttgcaagtgtcattgagattacgatttatgtgctaggattatcattggtcttaaatcgtctcaataatccgatcaatttagtcgtatacgcgttaggttacggtgtcggggtgtatgttgggatggtaattgaagatcgattagcgttagggtatacaatgatttcagtcattttacctgatcccaagtcgtcgttaccgggagtactccgtgaaaatggttttggggtcacacaacacgctgcttatggtctagaaggtgagcggctagaactagaaattttggccccacggaagaacgaacggcggctgtatggcctgattaaagacgcggcgcccaatgcgtttgtgatcgcgtatgaaccacgctacatctccggtggcttttggctcaagcgagttaagcgacgcaatgctcgccgaaaaaagcagtgataaacttgcaactgtgcgtgtcagcaagtatgattgttacaggataatgagcgttaaaataattcaataatcagattataattatttaaagcataggaaagtagggactgaagtggacaactcgattttaaacccaggtggtacgcttggcattattggaagtagtactaatggtgttggattagtaattgccgcgcgtaatgctggcatcaatgtcggggtatacggcgataacgaaaatactgagaccatggaactggcagattttcgcgttgtcggggccctcaatgatcaacaacagttacagaacttcgcagaacgttgtgatatggtgacttacgagtcggaaaccattgatgcgtcggtcattaattttttggcggcccatacccgggttccacaaggcgccgatgcgcttgagattacacaggaccgctctttggaacgggcgtttttcagccaacttaacttgaatgtagcaccgtcagcgacaattgtcagtttggatgatgtctatcaatcgatcgggtcaattggatatcctagtattttgaagccgattcaaaagggcttgggtcaaaatcggcaactggtcattaagacgcagacggatattgtcaaggcggctgatctgttggattggggcacatacttgttagagtcattgattccatatgataaggaactctccgtttttggcgctaagagtggtgatacgacagctttcttcccaaccgttgaaaaccggtatcgtaatcatgagctagttgcctcgattgtgccagctcaaattgattcagctgtgaatgacgaaatgctgcggatcacaaaggaaattagtgataacttgagttatacgggtgtctttgaagttgccttcttcttaacgaagagtggtaatttatacgtgaagcggattgtccctgcgatgcatcaggcgggttatgtcttcgaacgtgctacgaatattagtatggcagaacaacacttgcgagcaattgcgggactgccgttaatgccagtcaagcagttgatgcccgtggttgctgcttactttacaccggctcaggagagtggcattcgcacgcagtggcagattaagacgaactggttctttaatttctatcaccgaacgttgttacaagcgcaccgggcaccagtcgctggccacgtgctagtcgaagcaccaagtgttaaagaagcactcgaacagatcgaagacacaagtatttggcagtttgggcaaacgacgccggctgataatgaacctgaagctgagtagtgtatgatcagaacctagttttacggattattacggttaaactaatcgtactgttcgcaccgggtgaccagctattatgggtaaccgtcgtgaataaataaagttcgaaatccaattcattttgtgaattggatttttttagcggttggggagaagccagccaaatggcgagatacggttatctgagggggaatcgttgagattggcgtggcgggtattttggttagaaattgagggagtctcaaaattacttaaagttacgcaatattgccgtcaattcgtttcccgtgaatagtagaagttgtaaaattaacataggtgtcactgacaatggaaaaaccgcgatttttgtatgagatgctgaccttaaagtacagcaatcacggccaaaatttgctataatgtttggtgactgatttttagaaagggtggcgaacagcgtgtcgaaagaaagcctattggcaggaatgaatgacaagcagcaagaagccgttttagacacagaaggaccgctactaattatggccggtgcgggctcggggaagacccgtgtattgacgcaccgggtagcttatttaattgaagagcaaggggtcaacccctggaatgttttagcgattacgtttacgaacaaggccgcacgcgaaatgcgtgaacgggttggtaagctgttaggtgaatcggcgcaggaggtctgggtctcaacgttccatgccctgtgtgtccgaattttacgacgtgacattgaacaaatcgggtataaccgagcgttcacaatcgccggcactagcgagcaacggaccttagtcaaacgaatcttgacggaacaaaatatcgattcgaaaaaatttgatccacggtcaatcttatccgcaatttcaaatgcgaaaaatgacttacaaacgccggagatgtataaagaatcggctgccagtccctttgagagtgtcgtggcagacgtttatttgcaataccaacgtgaattagcggctgatcaagccgttgactttgatgatctgatcatgctgacgattcaattattcaagcagaatccagaaacgctggcgtggtaccaaaacaaattccattatattcacgtggatgaatatcaagatactaataacgcacagtatacgttagtcaacttgttagctgacaaatataaaaatttgtgtgtagttggggatgcggatcaatccatctatggttggcggggtgccaacatggaaaatattctcgatttcgaaaaggattatccgcaagctgacacggtgatgttggagcaaaactatcgttcgacaaagacaattttgtcggcggctaatgcagttattaacaataattcaacgcggcggccgaagaaattatggactgagaatgaaccgggtgacaagatttcttattatcgtggtcagagtgaaagtgatgaaactcactttgtcattgccaagattcaagaaagcatgcagcaggacaaaatggactacggcgattttgcgatcctttatcggacgaacgcacaatcccgggtaatggaagagtcactcgttaaggcgaacatcccctatacaatggtcggtggtaataagttctatgaccgtaaagaaattcgggacgtcttatcctacttgactttggcagtgaacgatcaagattcaatgaactttgaacgggtcgttaatgaacctaagcgcggcattggtcaaacgagtgttgaaaaattgcggttgttcgcggatgaagcgggttattccatgttggaagcagctagcaatgttgatatggctaatggcatttcagcacgagcgaagggtgctttagcgaagtttgcagcgacgatgaatgaattgcgcgctatgcgggaatacttatccgtgacggatttaacacaagagattcttgaccgcacgggttacatgaaggcgttgaaagatgctaaggcaacgaaatcgttagaggcacaagcccgtatcgaaaacattgaagaattcttgtctgtcaccaaacaattcgatgatagttatcaacctgaagatgaagatagtgacaaattcgtggacttcttagcggatttagcactggtttcggatgtggataacgttgaggaagaaccccaagccgtgacgctgatgacgttacatgcagcgaaggggctagaatttccggttgttttcttgattgggatggaagaaggtatcttcccactgtcccgggcaatgatggatgaagacgagctggaagaagaacggcggttagcatacgttgggattacgcgggctgagaagaagctgtacttgaccaatgcatactcacggatgctttacggtcggcggcagaataatccggcttcccgtttcgttgaagaaatcgaaccagaattactcaaaaatgaaaatacgttggatggtgcaagtagcactggtcctaaagttccatttggtgcggatcgtgaacggcgtgcttttacaccttcatataaaaagaatccagtggggacgcgggccacggtcaagaaggctagtggcacgggtgctgacaagaatagttggtcgatcggtgataaagtcaagcatcgtaagtggggaaccggaacggtcgtgaaggtctccggtgctggtgaagatgctgaactagacattgctttcaaatctgaaggaatcaagcggttattagccgcatttgcaccgatccaaaaagtacaggactagttaggaggactggctgatggcggacaaacccaacacaatgacggttgagcaggcggctgatgaagcggctgctttacggcaaacgttaaatgaatggcgtcggcagtactatgacgaagatgcgccgaacgttgaagatagtgtgtatgatcaaaagtatgaacggttggtcgaactcgaacaaacttttccacagctcgttacaccggattcaccgacgcaattagttggtggaacggttaaagcaggctttgataaagtgacccatgagattccgatgttgtcattgggcgacgtcttttcacaagctgagttacaagagtttgttgatcgcttggaacaaaacgttggtcatccagtcgattataattgtgagttgaaaattgatggtttagcgctgtcgttacgttacgaagatggggtgctcgttcaagggtccacgcggggtaacggtacggttggcgaagatattacggctaatattaagacaatcaagtcgattccacaacggttgacccgaccactgacgatcgatgtacgtggggaatgttatatgcctaaggcagcgtttgctgccttgaatgaacgccgagaagcagcgggagaaccagtctttgcgaatccacgcaatgctgcggccggtacgttacggcagctagattcacgagtcgtggcggaacgacagctcagcacgtttatgtataacattgccgactacgaaccgttaaccgcccgtacgcagagtgacatgttaacggagttcgcagatcttggttttgccatcaatcctgactttaaggtggcccattcgatggccgatgtctttagttacattgaccattatcaaaatgaacggccagaattagcatatggcattgatggcatcgtgatcaaagctaacccgttaccgctgcaacgctcactaggagcgacagtcaaggtgccacgatgggcgattgcctttaagtttccacctgatgagcagccgacccttttaaaggatgttgaatggaccgttggccgtacaggagtcgttacgccaactgcggttatggaacccgttcaactagctgggacgacggttgcgcgggcttcgttacacaatcccgattacgtggcggccaaagatgtccgcatcggtgatacggtcttgctacacaaggctggcgatattattccggaaatttcatcggttgatttagccaaacgacccaaggatgcgcaaccattagttattccaaccacgtgtccgtcttgtggggcgccgctggttcatttggaagacgaagtggctttacggtgtattaacccgaaatgtccagcacaagtccaagaagggctggttcattttgcctctcgcaatgccatgaatatcgatggcttgggaccacgaatcattgcgcaactctatgcaaatcggctggttagtgacgttgctggtttgtaccgattaactaaggcacaactgttaacattagataaaataaaagataaatctgctgaaaagctcttgacagcaattgaccgtagccgtgataattcacttgaacggttattgttcggtcttggtattcggcacgttggtgctaaagtggcgcggttaatcgcgcagcattttgggacgattgaggcgttgatggcagctagccaagaagagattgcggcgatcgattcgatgggcgatgtgattgcgaacgcagtggttcaatattttgagagcgacgaagttcatacactcatccgcgaattgcaagcagtcaacgtgaataccacttatcaaggccctagtgccaccgtggcagaagatagtaacagttggtttgcaggcaagcgggtcgtgttaactggtaagctggaaagctttacgaggccagatgcgactcaatggctacaagctcacggcgccacggttacgggaagcgtctctaaaaagacggatctcgtgattgcaggtagcgatgccggaagcaagttgcaaaaagcacagcagctggacattactgtatgggatgaagcccggttcagcgaaacaatgagggaggatgcacaagcgtgaatgttaaacgcatacgcacgattggcttagtggcagtagctgccattgttctagccgcctgcggtaatttaaagaattcgtcctttggatcgactagtagtagcaccacaacgaccggaacgaaaacaacgaccaccactggaactgctgatagtgagttctatcaaggcgtcatcaaaaatggccgttatcggacgagtaagtcgcgaggcgtggtcgtttcgcaaaatgataacgtcatgaatttgaagagcttcgaaagtggcttattggacgtgtctaaaaaggtctttccaacgagtaagtatgtctttcaagaagggcagtatttgagctcatcgacagttgaaaattggctcggacggaaatcaagcagcaattcggagggcttgaacccagagaataacggtaagaaggatccgaatactcggaatccgatttacttacaacagcttgaagaacaagattatatggttcaaaatggtagtaagttatcgcttggcggggtcacgattggcttgggaatgaactcggtcgattattatactaaggtcgaatatggggcaacatacgaaacggacatctcaacgactgagttaacggcgcaaggtaagaagatggcgaatactgtcttacaacggttgcggcaacgctcagctttgaagaatgtgccgattgtcttggcactctataagcagtcttcgaatgatagtttagttgggggcgacatgattgcctacgcggtctctaagaacggctccacttcgatctcaaactggacgtcgttgaattggaagaattatgtcttcccagcgacctctgagtcaaagaactcaggtgcgaatagtaatgatgagtcggactttagtcagtttaagtcccacgtgcagaatttcttcccgaacttgtctggcgtaacggcgaatgctcattacaaggacaaatcgttgagtaaattaagtgtcaacatcacgactaagttctacagcgaaacggaaatcatcagtttcacgcagtacttagcaacggctgctaaacggtacttgccatctggtgtaccggttgaaattacggttaagagtgccaatggtgacattcaaagcttcttagccagaacggcgaagggtagttcgtattacacccatgtctttagtgaccagggcgacgattaaacaataatattgagtaagatttgagaaagaaggaaatctgatggctgaagaacgaattaatgccgaacaagtgcaacacgtggcgagcttagccaaattggagtttacaccagaccaattagcgatgttcacaccgcaactagaaaaaattatcggcatgttcgaagaattaagcacagttgataccacgggtgtacccgttacgtcacggatgagtgatcatacgaatacgctacgtgaagacgtggcagttaagagtgatgaagcactccgggaagcattgctgaagaatgccccagaaacggccaatggcttgatcaaagtgccagcaattattgatgaaagtggggacggtgaataatgacttatttcgaccaagatctaactagtctacacgctgacttggtagccaagaagatcagtgccacggaactagcgaaggccacttttgcgaatatgaatcaggttgaccctaagctaggggcgttcttgaatttaaatgaagaacaggccttacaacaggcggctgctttggatcagaatggcatcgacgcgaacaacttttttgctgggattccgatggcagtcaaggataatattgtgacgaagggcctaacgacgacggcggcttctaaaatgttggaaaacttcgtgccggtctataatgccacggtggttgacaaactattagcaagcaacgcgttgatcgttggtaagaccaacatggatgaatttgccatgggagggtcaactgaaacgtcggcgttccatgtcactcgtaatccttgggacatcagccgggtgcccggtgggtcttcaggtggctcagctgtcgcagtggcttctggacaagtgccagttgcattcggttctgatacgggtggttcgattcggcaaccatcatcatttaacggaattgtcggtatgaaaccaacgtacggtcgggtctcacgctgggggctgattgcctttggatcttcattagatcaaattggcccaatgacacggacagtcaaggataacgcggccgctttgaatatgattgcaggtaacgatgtgcatgataccacgtcatccaaacaaactgtaccagactttacggctggtttgacgggtgatatcaagggtatgaagattgggttaccaaaagaatacatgggcgacgggatcgatcctaaagttcgtgaagtcattcaacaagcagtcaagcagtttgaagacttaggtgctacggttgaagaagtctccttaccaaacagtcgctacggtgtggctgcttattacatcattgcgtcttcagaagcttcttcaaacttacaacggtttgacgggattcgttatggtttccgggctgacgatgttaagaatttggaagatgtctatgtccgtagtcgttccgagggcttcggtgatgaagttaagcgccggattatgttagggaccttctccttgtcagctggttattacgatgcgtacttccacaaagctggtcaagttcggacgatgattatcaatgactttaataaggtctttgaagattacgatttgattatgggaccagttgcaccaacaccggcctttaagttgggtgacgaattatctgatccaattacgatgtatatgaacgatgtcttgacgattccagtcaacttggctgggttaccaggaatgtcagtaccagctgggtttgcagacgggttaccagttggcttgcaattaattggtaaggcgtttgatgaaagcacaatgtatcgagcgggctatgcctttgaacaagcaacgcaagtttacaagcaaaccccgaaagtcggaggtgctaactaatgaattttgtaaccacgattggtttggaagtccacgttgaattaaaaacgaactcaaaaatatttagtccttcacccgtgcaatttggttccgaaccaaatgccaacacgaacgtgatcgactgggggtatccgggggtattgccaacgcctaacaagggcgtggtcgaagctgggattaaagcagcaacggctttacatgctgaaatcgaacatcacacgtactttgaccggaagaactatttttacccggataacccgaaggcctaccaaattacgcaacatgaaaaaccaattgcgcatgatggttggattgaaatcgaagttgatggtaaaaagaaaaaaatcggtatcgaagagatgcatattgaagaagatgccgggaaaaacacccatgaaaacgactattcctatgtcgatttgaaccggcaagggacgccgctaattgaaattgtttctaagcctgacattgcctccccagaagaagcttatgcttactgtgaagcgttgcggcaacggatccaatttacgggcgtttcggacgttaagatggaagaaggttcaatgcgggtcgatgttaacatttcaattcggccggccggttccgacaagtatggtgtgaagaccgaaatgaagaacttgaactccttcaactacgtgcgcaagtcgttagaatatgaagagcaacgccaacaacaagttctcatggcgggtggcaagatccaacaagaaacgcggcgttttgatgaaacaacgggccaaacgatcttgatgcgggtcaaggaaggtagcgatgattaccgttacttcccagaacctgatattccagcagtcgatatcgatgatgactggattgcatccgttaagaagaccattccagaaatgcctggttcgcggcgtgaacgttacatcaatgaatttggtttaactgcttatgatgcgggtgtgttgacccaaactaaggaaatgtctgacttctttgatgcaaccgttgctgaaggtgcggatcctaaattagcttcaaactacttgcaaggggacgttaacgcgtacttgaacgagcataaagttgatttgttagcgactgacttaacgccaactaacttagctgggatgatcaagatgatttcagatgaaaccatctcaagtaagattgctaagaaggtctttaaggccattatggcgggatcagaacctgtccaatgggtcaacgacaagggcttagtccaattgtctgatccggcgaagttacaaccaatcgttgacgacgtattggataataatcaacaatcaattgatgactttaagaacgggaaagaccgggccgttgggttcctcgtgggtcaaatcatgaagaagacacgtggtcaagctaacccgaaagtcgtcaaccaactattaatgacatcattaaaagcacggtagaagcgttggtcgataaggtgttgagcctcgattgatgcatgtccagcgttggggtagggatgagacgctgaacgcttgaccgtgtgagcggaggaataggaaacatgcgtaaacgggcacgacttatttataacccgacttctggacgtgaggcattggcccacgatttagttgaaattcttggtatctttgaacaagctggttatgagaccagtgcgttcgcaacgacgcccgcccctaattcggcggctgatgaagcgcgacgttgtgccaaggacgggtttgaactgattgtagcagctggtggtgatgggaccatcaatcaagtagtaaacgggttagccgggttaaagcggcgacctaagatggctattattccggcgggtacgaccaacgattatgcccgggcactgcggattccgcgcaatgatccggttgcggcggccaaggtagtcctaaagaaccagacggttaagatggatatcggtcaggctggtgaacagtatttcattaacattgcggctgggggcatgttaacggagctgacctatgacgtaccatcacaattgaagtcgatttttgggtacgcggcatacttagccaagggtgctgagttattaccacgagtaaaaccagttgagatggatttgaaatatgatggtggtcattatcagggcaaggcttcgatgtttttcttagcgctgactaattcagttggtggctttgagcagttagtgccggacgcgtcattagatgatggtaaatttaccatgattattgtgaagacgagcaaccttgccaaaatgcttcacttaatgacattagtgctcaatggtggcaagcatatcaatgatccaagcattatttatgtgaagacgagcaaggtcgtcgccaaaccagctgacaaggatcgcttaatgatcaacttggatggggagtacggtggtgatgcaccgatgacgttccggaatttgaagcaacatatcgaaatgtttgccgatacggatcggatccccgatgaggcaatcacggatacggatccagagttggaagacgctgagcgacactttgtctcagccgttgatcagttgccagctgcaactgaggacgacgaaaaaacagaataacttgcttaaattaccgtttaccgatacaatggtggacggtaatttttttaaaagtgttaccatcacagggacctgactgagcattgcctaacgatttaatcgtttgtcgatttagcaatgatttgtcagtggtgcaaagcatgagacagctcaaattcgcgcgttttgacactcatggtaagcaatttgaatagcatgtttaatcagtaaatgttaacgacactgccaagtgtggcagtattaatgaccatatcactcgctgcccggagcagtggctaccaggcagtaactaaaaaataataagtcactaacaaagaaagcaagaggaaacaaatgaaagttaatttaccagtgcacaagggtgaagttttagacgtcactatcatggatttaacctatcagggtatgggtgttgctaaagtcgataattacccaatctttatcgaaaatgcattgccagaagaaaaaattacggtcaaggtcacgaagacgacgaagaactttgcgtttggtgatgtggaaaagattaaccaagtgagtcctcaccgggttaatcctaaagggcgcgtttatcgtcaaaccgggattgcaccactacaacacttggaatacagtgaacaattgaagtttaaacagcaccaggtggccgaattatttgcaaaggtccacatggatgatgtcgaagtcttaccaacaattggtatggtcaacccgacgcagtatcggaacaaggcccaagtacccgtacgacaagtccaaggacaactaacgactggtttttacaagaagaacagtcatcaattgatgccaattgaagattattatattcaagatcctgcaattgataaggctatcgtggtagttcgcgacattttacggaaatatcacgaggcagcctacgatgaattccatcatagtgggacgattcggacgatcatggtacggcgtgggtattacagtcatgagatgatggttgttattgtgacgcgaacgaaacacttaccaatggctgacgtggtcacacaagagattcaagcagcattacctgaagttgtcagtgtgattcaaaacgttaattctaagaagactaacgtgatcttagggccagttaacaacgtgttagctggtaaggccactatcgatgatcagttactgggcctgacattcgctatttcagcccagtccttctatcaagtgaacccacaacagaccgaaaagctttatcagttagccattgatcaagctggtttgacgggtaatgagacggtgatcgatgcttattccggtatcggaacgatttcgttaacgatggcccaacatgccaagcaagtgtatggtgttgaaatcgtgccagcagccatcgataacgcacggcagaatgcggataagaatggtattacgaacgcgacctttgttttggatagcgctgaaaaagccatggctaaatggcaagcagatggcgttaagccggacgtgatcgtcgttgatccgccacgtaagggcttggacgccgactttatcaagagtgccggtgaaatggcgcctaaacgggtggtttacattagttgtaacccatcaaccttagttcgagacgtccaacggtttgcagaatacggctaccatattagtgccccggtccaacccgtggaccagttcccacaaacaccacatattgaatcggtaacggtgttagaacgcgaacaataagcattttaaaactggattattaatgaaattatgaaaagtgtgttggatgcctgattatttgtcgggtaaccaacacacttttttactcagcttgagggctaactttgaattagaagcacaaaataaccgtttttaagcgctgatattgatttgaattcgtccgattttaatagacagatcatttagaatcggctaataaaacagtttattgataattataattattgctttaaataatttaataaataatgcgctgtaattgctgtaaactagttcactggagctgtttgagtcaaatttagcgtattaaattaaataattgtatttattggtcaaaaaacacccacaaaagccatcaattgtattacttttgataaaagtatgtatttcatctcggtttttgaccagtttgggttataatgataaacgaaataaaccgataaatgggggagcatgatggtaaagagaagaacactgacacaggcaaaagtattagcaacagctaatcagttaattgaaagcaagggaattaacggattaacaattcgggatttagcgttagttttggatgtgcggccgcaatcgatttataattatgttgatagcttgagtgatttattagatcaggttggcctccaatttgttcaaaatgttgcggatcgtttaactgaaacaatctcagacgttgacggtgatgaggctttgatggcatttgctcaagaattccgggcggcctgcaaccagcatcgggggttggcaccgttattacttgacttaaatgataacctaagaatcccacggtctcgtaaagcaattgtgcagttataccaagatatgtttaaaccattacaattggatgattcggcgcgggtggagaataccttgtaccgttccacgttgttcggattcattattcaagagattggcggcttctttaagatgcaggggactgaacttgatgaacggttcacgaaggttatgcagttagcgattgaccagacacacttacctgctgataaaacgaaaaaataatttaagattcagtgcggctatcttagcagatagccgttttttttataggttaaattcgccaatatttagcagtaaatggggcgtaatacaataatctttgctaaggctgaaatcaaaatcaataatgatttattgaagtaattttatgatcaatcgtaatgaaaatcttaattctgcatggtaaacgctaaattagggcgttattttggccccaggcttaaaaaatcgtttacaataaggttaaagttaattttaagggggcccaccatgtcggaacgttatttatcagcaattgaacacgggttaacgactaagcaagttgaccagcgcctgacagcgggtctaaagaatgagccgttaccgcccttaacgcggtctgttaaacagatttttcgtgataatttgctaacactttttaactgtatcaatgttttgttagccggattagtctttttgacgggaagctataagaacatgctgttcttattcgtggtcatcgtcaacacggccatcggtatttttcaggagattcgtgccaagcgtcaggtcgataagctggcattattatcggccactaaggttcaagtccgccgtgacggtcaaacggtggcgattggtcaggacgaaatcgttcaggatgatttactattagtgacccgtggcgagcagattcctgtggatgggctcgtgcgggcgaccgctggattagaggtcgatgagtcgcagattactggtgaggctgatccggttattaaggggccgggtgatgatctggtttctgggagtgtcatccttggtggtcacggaatcgtgcaggcaacgcaggttggtcacggcagttttatcaagcagatggcgcgagcagctaagcaaaaacggcggacgccaagtcaactgttaacgattatcaatcgaattatcaaaattttgacttttacgattattccactaggtgctggactgttcatttccactatgatgcggggtgaaagtcagaaccgggccatcctcgggacggtggccgcgatggtcgggatgattccggaaggactggtgctgttaacgtcagtcgctttagctgctggggcgttcactttaggccggcaccaggtattggtgcgggagctacccgccattgaagcactggcccgggtcgatacgttgtgcctcgacaagactggaacgattactagtggcaagttagtttttgaacgcgttgagccgtggaaccagcatgatttgacagcagtggagcaccggttagctgcgttagtcactgccattgatgatgataatgaaacggcccgggccatcaagactgcttttggtcagccgccagtgcaagcgacagaagttcttcccttttcttcaagtcgtaagtggagtggggctgcgtttgatggtcacgcttacgttatgggcgcaccggaatttatttttaccacggtacccggcgagttacagtctcgcatcaaaacgctcgcgcaacaaggttatcgggtattagtgttagccgaagtggccgccttaacgacgcccaaaccgactcgaccgatgactttgggattaattctgatcacggatgagttgcggccacacgctaagacgacgtttggtttttttgctaatcaagacgtcgccctaaaagttatttctggtgataatccggtgacggtcgctagtattgcacaacgggctgaaatcaaagacgctgatcggctggttgatatgagtcaagtggggactacccccgactatgatcagctagtgactaattatacggtgttcggtcgagtgacgccgcaacaaaaagagcaactaattaaagcctatcagcgcaacggccataccgtagcgatgactggtgacggcgttaatgatttgttggcgctgaaacaggcggattgtagtatcgcgatggcgagtgggagtgaagccacgaagagtttggctgattttgtcttaatcgattcgaactttgatgcgatggtgcaagtgctgaacgagggtcgccgcgttatcaataatattgaacgggtcgccgcgctctacttgattaagacgatgtattcggtcgctctgacgttgatttttatcttcatgagccacagctacccgtttgagcccatccaattaacaccgatttcatcgttgatggttggtattccaacctttttcttggcgttacagcctgattatacgcgaattaccgggcgctttatgaaacaggtgatggagattgccgttcccgcggcgatctgcgtggtcggctatatcatggtcatcatggtgttaggtaataagttccagctgaatttcgaaacgaccgcgacattgagtgtgttgatgaccgggatctttagtttaaatgcgttattgattgcagcccggccgttgaaccggttcaaaattgggttagtcgtgttaatggcaacactgttcgtcctagtctttttgtttgccggccgaattttctcattggttaatctattagattggtcgttagctgtgatttacctaccactgatgatcagtgcgtatccggtgttcattgttctgcaaaatggcttaggaaaacgcgttctcagcaagatcaattggcgataatcgatcaaatttaggtgacggggccacgctgcaattacggcgtggccttttttggtgtaatcagattgctgtctcagcgtaagccacaccgttgttgaccagtcagattaaattaacaatccgatataagtatggttgataccagcatagcatgtaaatttataacagattttaataggcagcagcgtctaaaacggcttataatgaagttcagtagattaccggaatgggggcggtattgtgtggcttgatgaacaacggttaattcaacggttagtgccgcgcttgttgcgttttcggcaaactaacttctatcggattattcaacggaccttgatgttgacgttcccattcattttgattgggacgttcagtcaaatcattcaactgaccgtgttgacgaaaacggggtttattgccagtatctttcacctgtcaaaatgggtcccatactatcgttacttacactatccgtttgatagtttaacaaccttgacgctcaacggtgtggccgtagtagcagcatttggtgcggcaaaataccatgccaaactcaatcagcgcgatgaccaactagcgggattgaccgccgcgattgcgctattgatcgtggcttatcagtatacgaatcaaaatcaaattggtgtttttaacactttattgatcgggactaacggtctaacgggcgcattgattgtgggtggtttgaccggcctgctcttcaaatggttcagcaagccggttccggcacaaagtagtccgcatacggccgatatcttgacacggactttcagttcactacttccaatggccttaatactagtattggccgtgctagtgagcctcgctttgaactggctgatgattattacgtactctgctgaaagttggtcggcatttcaaaagtacgcaacgactagtcacagtctgtggctgacctttggcatggcagttgtgacgctgttgttagaaattcttggactagctggtccgtaccaagaacgcttggtgaccaacagtgcgacaatgacggccaatttgaattatgcactcacacatcactcggcgtatcacgtgccgtatccgtatacggccaacacgttgtatcacgcatttgggacgtttggcggaacggggatgttgctggccttagtgattgccatttatatcggtagcaacaatcataactaccacgtagtcgcgcggtggagtctattacctgcgctctttaatagtaatggaccgctactgacaggcttaccagttctatataatccaatctatctaataccatttgtgcttgcgcctgtcgtaaatatgggactggcggcgctggcaattgggtttcattggattccacccgtggtttatccggttcccgtgggtacgccgggaccgttgattgcctttatcggcactaacggtaacgtggtggcacttttacttggtatcgttgatttggcactatcagtggtgatctatttgccgttcatgcggttggcggaaaccattgtgcaggcggcgcaagcacaggtggggggtgctaagcatgtataatcgacctaattggcagcgacggcggcgaagtctgttagtgcttgtattaggcttactgtttctgggctttttgattcagccctcataccagtggacgaaaaccaacgtggctgcgatggcaggacgccatgattcgcagatgtcaccaattattatgattcccggcagtagtgcgactcagaatcggtttgacaccttagtcaagcaacttaataaggctgatcatcgtcggcatagtttaattaagctgaccgtgatgacggatgatacgattaaaatgacggggtcgttgcgtgcccgtgataacgagccaatcatcgtcgttggctttcaaaataatcgtgacggctatgataatattaagcatcaggcccgttggttctcactggcctttaagaagttggctgccaagtatcaattcaataatttcaaagcaattggtcactcgaatggtggtctgatttatacgtactactttgaacactattttaatcgcgacgatattaaggtcaaacgaattatgaccattggctcaccttacaatttctcagaagctaatttgaatcataagacacaaatgttagctgactttattaagtaccgcgatcgattgcctaagtcagcgacaatgtattcggtcgcaggtaccgaaaactatgattcagacggtcttgttccagcgcggagtgtcgaggctggcaagtatatctatcaagggcaagtcaagcattttacagagattacggttactggtacgaatgcccagcactccgatttacctcaaaatgcgcaaattgtcacgttgattagaacttacatgttggataagccgaaacagactcgtaagggcttagtatcgacggggactgtcgaatgagcggcaacgaggttcagtcgttgtggactggacagtgttcaagagtttgtgacggtggcacctgtgaggaagtttagggtgttattaagaattgtggtaaaatttggtcatggaggtggccgaaatgtccacacaatcaccagtacatcgcaatcgggtcctgactttaattcggtcttattatccgaatttaagtgtgacggaccgcaagattgctgactatattattgccgacccaattaaaacggcggctcagtcgatttcagacttggctgccgcggttggcgtttcaacggccacggtttcacggtttgtcaaacggattagttttagtagcttccgtgacttctcacgtgaactaacggcggccgaaccgattgaacaaactaatgcggaagcttttcaagatgtcgaaaaacaaacgactttcaaaggaattgcggaatcaacattcaatagtattcgtagttcgctagatcagacaagtcaggtaatgacggaagcagatctcaagcgggcggtggaattattgctaaatgctcgctcgattggcttttatggcctcgggggctccgcagtcgctgccttagatgggtatcataagtttgtgcgcaccggtattccgtgtgcccataatagtgactatgatatgcaactgatgcaagcggctcagatgaatgccagtgacgtggcagtggttatctcacataccgggcgtaatcagcaaacactacaagtgctagccaccctgacttcacaaagtgtgccagtgatcgctttaactagcttcggtaactcgcccctggctaaggacagtaccgttgcctttatttcagttgcagaagaaattaactatcgttcggaagggctgacttcgttgattgcccagatgagtattatcgatagtctcttcttgatgactgctgttcatggcaatatcgaaatggcagaaagtcttggccgggttcgcgaggccattagtcaaacacgaacggagctttaatgctgtaggcaaaggattgatgagatgacaaagcggcaacattatcgaccagtatacgcaaaaacgcggtgggcgcggtggcgttatcgactgggctggttattagttctattagtaatcattggcagcgtttggggcggcttgtcttggttacgttggcgtagtgacgctgtcgtgagtgggtttgatgtccgtggggttgctgtgtcacaaaatgacggttatttagattttgcggccttgcaaaatgatgggctcaagtttgtctatttacacgctactcaaggagctagttatacggatgataactttgcaagcaattatgaacgaatcgttggcacaagtttaggtgttggcgtaatccatacgtttagtttttcatcgactgctgcggcccaagcggcctatttcgagaaaacggtcggggatagcatcggcaatttaccaattgcgattcaagtgcaatactacggtgactacacggaccagacgattgcggttcgaaaaagtcgtgccaagcttaaggcattagtgaccacgttgacccaggattataatcgctcctgcgtcgtatggtcaacgcccgcagttgccaagcagatcgttaagcccgcactaaaagacactgacttatggctggacacggcgaagacccaccaacagggacgacgagtgatgtttatgcattattccgatcgcgccgtttaccgccagaacgggactcgtcaagagttcgctggaattctattcaacggtagtgtgacagcgtacaataaagttgtggcgcagggcttaaattaaggcctaatccttgaataacttatttcgcaaattaaattaacagcttattagctgctaggctgactaaaaataagtcgcaagttcaagactcttcttgaacttgcgacttattttgatggcgacctattaaaatccttaggacgtcactagcgtcattaggtatttggcgataagatgacataactgcgatcatcggcttcgtcaaagagggttacaggtcgttgctcattagcccgcacctcaaggtgaaatccatattgatcaagtaagacgagcgcactcgatgagatggattcgacggtggctggtaccgagcgcccgtcgatgcgaatcatcatgttgggatcaatctccaacgtgtggtcccggtgatgagcctcatcacgataggtccaagttcccgcgtagaaaaccgctaagtcaccgtcagcgatcgtactagggtgccgtttgtggagtagtgtactagaaagtcctgcaagtaatgataaaccaaataatattgcgccacgccgcttcactggatcaaccttctttctgaataaatctatagttaaaatataccactaaaacggcgttaacgtcacgtaataagtggattcttattaaagcctttatgtcactgttacctgcgggtaatgaacgtaatattttatcaatttcggaagggcggtaactaatttttttgaattaatttgtgttctgattggaaattactgggtgagtgtgttaatctatataatgtgattggcatttatgtgaagttttaaagtatcatttaattgtgttaccgtaaattctttataggtgttaataacatgtgttagttactttttatttttatatcctaggaggatttagttcatgaaaaatggtactgtaaaatggttcaatgctgataagggttatggctttattactggtgaagatggcaacgatgtattcgttcacttctcagctatccaaactgacggtttcaagaccttagaagaaggccaaaaagttacctttgatgaagaatcaagcgatcgtggcccacaagctgctaacgttgttcctcaataatcttagcttttaaaagggctgcccgtgtggcggctctttttttatgcgcaaaatagcgggtgacttttgatccttatggcccaacttaacggcgaaaactggtaaaatagaattataaactaaaagcacgagtaagcgccaccaatcacgactggttgactagcgccgttgagaggagtcaaatcgatgttaaaattaggaattatcggaacgaattggattacacaacaatttattgatgctgccgctgcctctggtgaatggcaattgacgagtgtttattcccgccatgctgagaccgcgcaggcttttgccgccaagaatcatgccgatgagacttttacggatttagatgcatttttcagtcggggtagttttgatacggtctacattgcgtcaccaaacagtctgcattttgcccaggctaaacaagcaatcgcctatggtaagcacgtcatcgtcgagaagccagccgtggcgaaccaacaagaatttgaacagttagatgccgttttaaaggctcaccctgatgtcctattatttgaagcagcacgccagattcacgaagttaatttccaacgcgtcaaggatcagattaaaaagttatccttagttcagggtgcgacgttgacttacatgaagtactcgtcacggtatgacgccgtcttggctggtgaagaaccgaatatcttctcgttgaactttgccggtggggcgcttcaggatttaggtgtgtacctggcctacgatgcggtcggctggttcggcatgccggaagaggtggcttactacccaaccttgattcgaacgggcgttgacggtaagggtgtggctattttacgctacgctgactttacggtgaccttgaacgttggtaagactagtaattcgttcttgccatctgaaatcaacggtctgcgcgacgctattgtgatggataatcctgctgaacttggacaaatcacttatcaagataaggatggtcaggagcatgcgattggggcgcaactcgataccaatccaatgctggccgaggcgcgcgacttcgcaaccgttatcaatgacccaagcaatcaccagacggaatacttagcttggcggcaacttagtcgaaatgttaataaactattatttaatttgcggcagtcagggcacctatattttacgggtgaagcccctgataccgataaatagaaatgaggcactatgttagacgtatttaaaactaaatttgcggcggcggggttcaccgagttgtcgccgattcaaacggcagtggccgagccacttgcagctggtcaatcggtgttaggactcgcaccaacggggtctggtaagaccctagcgtttacgtggccaatgctcgaagcgttgcgggtcggagaaggcacgcaggcactgatcttagcgccatcacaagaactcgcaatgcaaacaaccaacgtggtgcgcgagtggggccagttgatcgatgccaaagtcctcgcgattacggggggggctaacgttaagcggcagatggaaaagctcaaaaagcatcctgaagtaattgttgggacgccggggcggattactaacctgattgcggatggtaagatcaagcttgggtatttgaagatgatgatcgtcgacgaagccgatgaattactgacagatgaaaccttggatcagattcgtgaaattctcgacgctacatttgctgaaacgttacaattaggcttcttctcagcaaccgaaactaaaattttagatgagttgccacgctggtttggtcagcatgttgaaaaaatcgatgtgcgggccattgatcagacccagggggtggttcggcaccggacgatgcaagtgggtaatcggcaccgggtggacttactgaaacggattagtcgtgttgaccatatgcgggccctcgttttcttcaataagatgcaggaactccaacatgtcgccttagaattacgacaccagcacgtgagttacgttgccttgaccagtaatcaacgtcaggttgaacgtgaaaaagcgttgcggttattccggcaaggcaaagtcgggctgttgttgaccactgatttggcggctcggggtctagacgtgcctgaattgccagctgtgatcaactatcagctacctaaagatgtcacgacttatattcaccggagtggtcggacaggccgcatgggtgctgatggactagtcttgacgttcggtgacgaccatgatgtccgcgactttaagaagctgatggcgacgaccgactatgaaatcaagccgggttacttggttgattatcatattgttgatacgaaaccagataaagttgttccaccgttaacgttcgaccatccagaaacggctggcaacgcggctaacggtcggcaccgggtcgtgagtgctggtcacccagatgaggttaaacgagtggagacaagccggaaacggcccgctgcggcaacacctaaaaagaagaagggtcacaataagcattctaagaaaaaagggatgcgcaagaaaaatcgtgatcgctttagcaatcagtaattgccaaaatgcacaatccgtgagatgatattttacggattgttaatggcctcatagcacaactggatagggcacccgcctcctaagcggttgatcccggttcgagtccgggtgaggtcagttgaatattagaaagcaccgtttcagggcagcgttttagtgacgttaccttggaatggtgctttgggtttaagtagccacaaatgatatgaaatcgaaatgaatactgtattagtgggtctatgatatttagtgttgatggataaaatccatcaacactatttttatgtacaacaaaaggacatatcgtcctgtgctacaatcaagtcgaccaaaaccaattgaaagcgagtgtcagatatgtcccaggaccattctactaaagtactgctccaaattaaagacccaaatattactgatttagttgttcaaaaagctactaacggaagcttacaagtgcttgcaaagctaacgtatccggttactgtttgcgcacgttgtggcaaacgttccatggttaagaatggctttaagaccgttcacatcagaattcctagaattagcgaacgagtcaccatccttaacttaaagaagcagcgatttatctgtaaaaattgtggtaaaagtagtttaacaacgactacgctggttaaaaaacatcatcaaatatctgaaaacagtctgcatgccattgatctatcattaactgaagaccgtacgatggctagtattgcggctcaatacaatgtctcgaccaatacgattagtcgccgaataaagttactcggacaaggtacccaaccagctttcaacggactaccaacgatgctttgtatcgacgaatttcgttcaactggtaaacaaatgagttttattgcggtggatgcccaaacccacgacatcattacaattttaccaggacgtaagaatgccgatattaaagacttctttctcaatcattattctaaacgtcatcgtgaccgcgtaacccgggttgtgatggactttaattctcaatatcaacccgcgattcgaacactctttccacacgccaaactagtcgcagataactttcatcttgttcaaatggccttacgatctttgaatcaaactcgggtccaactcatgaaacgctttaaccctaagagtcgtgaataccgagtgcttaaatattattggcggttatatttaaaagattatgacagcctcgaaaagcgcaaacctcaatggtttgcgcatcttaaagatcgcatgacaccagagcaattagtcgtagccggtttaaatctagaccaacagtttcgacaaacctaccaagccgcacatgccttagttaaggcttttcaaaagcgtgattatcgatccttcaaagcagcactaggtcatgtcgaaaatgtcagtcctcagctaatgaccaatattaaaagctttatcaagaaccggcaactcatcaaaaatatgactaccggccgattatcaaatggtcccgtcgaaggtgtgaaccgtaaaatcaagcaaatcaaaagaaccgcgtatggttacaagaactggcaaaactttatttatcgaattcaaattgagttcaaaatcaaaatcgaaaaaaagaacccaattcgtaaatgaattggattctaaatataacttcatcaacaccggttgacagagacccgtattagtctaaacgcccgctaccagtccaaatgactagtagcgggcgttgcgattaacgaatgacgatgacgttgcaaggggcgtgatccacgacgtagctggtcgttgaaccaacggctacgcgatggggcgagttggtaccagtggcgccgagcacgatcaagtcaatttcgggatgttgcttggcatagtcctcaatggtgtgttttggaatcccgtagctgatttcagtttttaaattcggtgcggacgtggtggcgacgaattgttgtcgctgccgcatggcatcctttgcgtgagcggcttccgcgtctagtaattcagatagaaccgggtcgagtgcgggggtgtggtaggcgctgtcatccaccacgtagagcgcagtcaggtttgcttggtgccgctgggcaatgttgaccgcttcagtaaaagcggcttgtgcagcatcggaactgtcaacgggtactaaaatatttgtgtaacggcttggcattataaccacctccagttatctttacgataattataatggattagtgttgggcaataaaattaaacgcacctagtgggcaaggtcgatgaactagcgtatattatagacagtaaatttcttttgggggttaggtatgttaaagcatgtacagaacagcctattgacctttgaacgggtcgttgagcggcaacgttattggcgcgccttacgtgatacgttgacgctgctttttccattcgcattagttggggcgtacgttagttttatgaaccaggcaatctttcagcgcaatggttttttgaatcatatttattatctcagtcactggctgccggggtttaaacatttggcaacttacacgacgatgcttaatctgagtatcaacggcatccttgccgtgattgcggctttttcagctgctaattttgttgcgcggagtgcccagcgtgacaatctgttagcgggattgacggcggcaattagttttatcatgcttaatatcaattataatttttttagtacccagggtcagcctgctggcagtcggtttttagaagataatttgggaactcagggcatcttcctcgcactattggtgggcctgttgactggttggttgttcagtcatttgacacggtatccacacatccaccaggagatcgagacccagacccacttgctagcacgggcacacgcgaactggttaccgatagtcgctgctttgctggtgttcagtgccatcgggtatggtgttagttttgtcagtaaagggggattaaacggcctgttttacgcggtcttcaccttaccattcagtaatccgggggcgtcgctactagcgataattggcgtggcatcactcagcaatttatactggttaattgggattatcggtccggttgactttagtggtaacagtactacgagtacggttcaaaatttggaatatgcgttgcaacacggttcggcgtggggcgcgccaaatccagtaacgctccatacgttatttgatgcgtttgcgaacgtaggtggtcccggaatgacgttagcgttattgattgcaattttgtggcgttcacgtaaccgtaattatcgaacggtggccaagaccagtgccttgccagtactgtttaatatcaaccaaccgttgctcgtcggcttaccgattgcttatagtccgattttagcgattccgtttctattagcgccactggctagcatggtcatcacgtggtgcgcgttgaagcttcaatggatgccgccggtcgtttatccggttggtagaacgatgccgggcttcttgaccggttggctgggaactggtggcgactggcgggccttcatcgttagtctgatcaatatagcggtagccacagcaatctacttgccatttgtcctattggcaaaccaggttgaggaggaggcgcaggcggatgcttaaacgatattggtggcggtggcttcttggaatcggtttgttagtcgggatctgttggccggcctacacgtggagtcaagcgaatatcaagacgctgaaaaacactggtcggacgcggatggcaccagctattatggtccccggatcgagtgcgtcacagaaccggtttgatagtttgattaccgagttggggaaggaaacgccgaaaaaacacagtgtattgaagctgacagttcagacggatgggacaattaagtatagtggttcgattgctgctaatgataatgagccgtttatcgtgattggcttcgcgaataatcgtgatggtaaagctaatattgataagcaagctgtctggttgaatacggcattcaaggcgttggtcaaaacgtatcactttaatcacttttatgcgctaggtcattccaatggtggcctcatttggaccctctttttagagcgctatctaaaggaaagtccgaaggttcatattgaccggttaatgacgattgcctcgccgtacaatatggaatcgacaagtacgaccgccaagacgagcatgttcaaggaactttaccgttatcggactggtttgccggaatcgttaaccgtttactcgattgcggggacggaaaactataccagtgatgggacggtgccgtataacagcgttaactacggtaagtacatctttcaagatcaggtcaagcattttacggagattactgtaacgggggcgaatacggcgcactccgatctaccacagaataagcaaatcgtcagcctgattcgacagtacttactggctgaaacgatgcctgacaaggttcgtcaaaaaaacgcacaacgggtacaaaattagttacgttgtgtggcagtgatactgctgttaagacaacactggtgagcgatctggttaagaaagttatacatgcagtgaatagaacgacaaaaacgattagcgtcccggttacgagacgctaatcgttttttagttagatttgcaataaattaatgatgatgcctggcgttgtgtgagcgggctgaccgtttcgagtagtggtgcttcgacggcttcgcccggtgcttgactcgcattgtgacacgggttccccgaactcgcaaggcttgtgcattggttgccggcagggtcagtaaaccgccacagacggccaggatgacgagcactggtaatcctcggtggatcgacatgatagaacgccccccttaactaaaatccttatttagtgtataagtaattcgagtcagcgtcaacctaaggtccgttactgactttacaaaacgttaacggcatattaacggattattcacaaaaagccggcaaatttgattgtattttgccaagttttcctttatggtgggagtaatatataaaagggagtttggctaaatgaatattgaaatcttaaactcagcaatccaagacttacatttccaaatcgtttatgatcgttctgaagacgatgacaatcctggtcaggggcaattcagctatacgaccgccaatccagatgttaagaagacgtttggcgatgacgttgtgcaggctcaattacaagtgacctataaagaagaaatgttcgacttatccgcgaccgtttttgcgattgtacgcctaagtggtgagatggtgggaattattgaacgtcaatctgacaacaaatcaattgaagacgacgaacaagaaatgttgaacaatttgaatggtgccatcattccagcgttgtctgccaaagtccgggcctatgcagcattattgtcaactgaagctagcaactttgccatcatgccagctgactttgatgatagccagcccaatgatgctgaataagcgtaatccaagagcttgtcaaactggcaagctttttttgatgacttaaggaatgagttctagcgttgtgtaaccgttaacaaaggtgctataataatgatggtcagagttgactaggcaactgcggttgcaatgacgaggtcagaaggtctgattggtgacttcagcaattattactttgatccaggcttatcggaatggttcaaagcgggggtgaccgcaagtcggtcagcacacataggggcagtgaatattgacacatagtttgagccaagctggtaagtatcgtggtggccaagttacgctgtaatttggccgctatttttatcttattttcagccgaacactgcgacaaaaaatgaaaactgtcgtgatgaaatcactgtaaattgtcacatgaaagcgtatactgacggtgagaggggtgagtgttatgtttaaaccaatggcatctgtttttacgaaccatcaaattgcgggtcattatcgggccattgagcgggcgcaaaagtgcgtggttccatttcattttgagattcagggacaggagtatccaaagccaaaaccagaacgtaactggttacggcgcttatcggggacgtcgagcgagaagtacgcaatggtcgaactgaccccgacaaaggtcgttttgtggtcaccagaaggacgcaatctgggtgaaatgccactgagtgcggtgcggcgaattcagatcggtgcgattcggtgtcacgtaacggaaggactcgacccacgccacgcatttcgggcgacgatctttgtgctgactgatagcggtaattattattttgctaattctgatatggaagttttaccggcgatttgtaagttcgcccatgaacatcaagtgccggtagaagacccactgcggttgattccgcttttgaaggtcggctggcgggtcgcggccgtgacgttacatgaaacctatgcgcaactggttgcccacacgggttatccggctgataaggtttaacttgattttatgattaataataatgaaaaacggacgtcgataatgacaatccgtttttttgatgcgattaaatgtagttggcttaaactaagccttgcgctaacatggcgtcagcaacttttgtgaagccagcaatgttagcaccactcaggtaatcaccgctaacgtggtattcgtcggcagcggcaacggagtgtgcaaagatatcttgcatgatttgcttgaggcgattatcgacttcttcaaaagtccagctcaaacgcatactattttggctcatttcaagggcggaaacggcaacgccaccagcattggcagctttggccggaccatatagcaagctggcagcttggtatgccgcaatggcttctggactgctaggcatgttagccccttcggcaacgaccttggcaccattggcaatcaagttcttggcttgattaccgctgatttcgttttgggtggcgcaaggtaacgcgatatcataagctacttgggcatcccagacggaaccttcgtaatagctggcactggctacacgatcggcatagtctttgatgcgaccgcgttcaacttcctttatctgcttaacgatcttgaagtcgataccgttttcgtcaataacgtaaccgtttgagtcggagcaggtaatcaccttgccaccgagttcttcaaccttttgaatcgcgtagatggcgacattaccagcaccagaaatggcaacgcgttgaccagggaaggaaagttggttggccttgagcatttcgttggtatagtaggcgagaccataaccggtagcttcagtccgggctaacgaaccgccatagttcaatcctttaccggtgagtacgccgcggtcagcgccccggagtcgcttgtattggccgtataaaaagccgatttcgcggccaccaacaccgatatcaccagcaggaacgtcagtatcgagaccaatgtacttgctcagttcggtcatgaaactctgacagaagcgcataatttcgttgtctgatttgcccttagggtcgaaatcagagccccctttaccaccgccaattggtaggccggtcagggcatttttgaagatctgttcaaagcccaagaatttgacgatactcagattaacggatgggtgtaaccgtaagccgcccttgtaaggaccgattgctgagttaaattgtactcggaacccacggttgactcgtgcatgaccagcatcgtcgagccaaggaacccggaattgaataatccgttctggttcggtcaaacgttccaaaatattggcttcgatatattctggatgttgttcgaggactggcgtgatcgttttgaagacgtcgttgatggcctctaaaaattcggtttggttcggatcacggtgttcaatgacttggtaaacatgttggacataatcggttgcttgactcaatatgatcatccttccttgaataagttaactataatcttcattttaatggtcacgttcggaaattgcacgagttaaattaactaaattttgatgaatttttagtgattgtggtaaaaccgtgctgttgatagcgcttgcgatttggttcggcggactaacaataattcgcattttaatgcaaagtcagaagtgagggcgtatgcttggggcaattaaatagtagtcaagtcagatttgacgggcgactcatcaggaacaggggggatcatgatgaacaaacggcgttggttattaagtttattgccaatcttactggggttgattggcgtgggtgtgtggggatcacagcaattaggtcaaggagcacagcaagtgacaccaaagacaattaaagtacagcaggcagcgtcaaaaatcaaatccgcgacgaaaaagcaaacgacgactaagcctaaagtgaagcccggccagcttactgaggcccaggcaatcaagcaaatcgatcagttgatcaaaagtcatcatattatggggacactattactgaccacgaacggtccggcgggggtccgggttcgaacgtatggttatgcggatgatgccaatcaagtccgcaatactgcgacggaggcttatccattagcgtcattacaaaaagctgtgactggcgtgatggttcaaaaactgatcaatcaaggtaagctgagtctgacaacgaagctgagtcacttttacccggaaattccgtacgccaaccagattacgatacgtgaactattagaccatcgttccggtattcggatgactgagataacaccaaagacgattttaccaacggagacggcgcggctgaactttacactgcaacatttacggtcgacgaataatcatgcttatgcctattccaacgcgaactttaccttattggcaggggttattcgcaaagtgacgcataaatcctatcaggcggctttgactaatgacatcattcggccattgggattaaaacatacctatgaatataacgatattccgggcaatgtgatcaacccgacttcgtatcgcttggctaatgggtttggtcagagtggcatcatttctaagccgttacaatctagtgaattaggctgtggtagtctatatatgagtgtgggggattattataaatttatgtatgggcttcaaagcggccagctagttggcgaagccggtttaaagtcacttgcggataattttcaaattaaatattcggcaggcgtttattaccaggcaggccagttgattcgagtgggtggcaatgacaataattttcatagctactatatggggtcgcgaaatgccaaagtcgccttagtcttatttgaaaatcagggtgtttttggtggtgacaaccaggtagcgtataagattcgtgatattttattgaagacggtacctttttagaaacggtacgggctgaacatcatcttaattgcgggagaacgtgtgcctgcaatcaaggtggtgtttttgcttacccgtccgtttggctgaatccttgaaaataactaaacttttactcgaaatgatggcgccacgacgtaactaacgctatgatgagattagaaactaaatgatgcaggtgaaagttaatgacaaaaccaattaaggtaatgacgattttcggcacgcggccagaagcaattaagatggcgcccatcgtgttgcagttgcagcaacagccacaatttgaaccggtaacggtggtgacggctcaacaccgcgagatgttagaccaggtgctcacgatttttcacattacgccggactatgatttgaatatcatgaagcctaatcagacgttagctggtatcaccagccgggtactgacgaagttagatgcaattatggatacagtcaagcctgatatcgtgctggtgcatggtgatacaaccacgacgtttgcagctagtgtgagtgctttttatcatcaaatcccagtcggacacgtggaagcggggttgcggacgtggcagaagtactcgccatatcctgaagagatgaatcggcagctgaccgatgtgctggccgacatgtactttgcaccgaccgaattaagtcggcagaatctattgaaggaaaaccatccggatacggccatcacggtaacgggcaatacggccatcgatgccctaaaacagacggtttcgatggactatcaacacgctgcgcttgatttgattcagcctgggcaccggatgatcttactcacgatgcatcggcgtgagaatcagggcgccccgatggaagcggtctttgtcgccatcaaacgagtggttgctcagcatcccgatgtcgaagtggtctacccagtacacttgagtccggcagtgcagacagtcgctaaacgtatcctcggccataccgatcgcattcacctcattgacccgctcgacgtgcttgatttccacaacatggcggcgcgcagttacttcattatgacggattcgggtggggtgcaggaagaagccccgtcactgaataaaccggtgctcgtattgcgtgatactactgaacgaccggaaggggtcaccgcggggacgttacgattagtcggcactgatggtcagcaggttgcggcagcgatgaccagtctgttagatgattccgcagcgtaccaacggatggcagacgctaaaaatccttatggcgatggtcatgctgcggaatacatcttacaagcgattatgaaaaaaattggtacacattaaaattatttacatttttgtataaacagtgtaatattaagcactgacatagtgataaaaattttcacttctcctgtaaagatgtgaaattagtgaagtagccggagatggatgccgcgggggtatcaataccggttatttttttgcgttaaaatctagatggcccggtactactgagtgtctaggcagctacttgattttgtcaaagtggctgacggccggaagataagcagattttactcgtcagcggccaggtattgtcatcaattgatctgattggaccgactagtctattcgccgaaagcactaatcctagtataaaaggtgtttcccacggcattccattgtataattgtaaatactataagtgagcgttgaggataaatgaatgaatttaaaagcccgttaccctaaaattacgaaaagcctggaaattattattcggcggtatggacaagccaatgtcagcaataatgcgattgtgctggcctactacgcgttaatgtcgattgccccgataatcttgattgccggaaacctcatagcccggtttgatttgaagtctggacagattttagcgtacgctcaggaagttattcctagtaatgtctaccagacgtttaagccgattttagtttcatttctgtctagtggcagcagcagtagtttgtcaattgggattttggtgacagtctggtcggcgtctaaaatcattgcggcaattcgcaggagtctaaatgaggcgtacggggtcacggatgcccaaaatgccgtatggacgcgaattattgcctttttcttaacgttgggactattactcctcatcgtagggctggcgattttcttcacgttgagtcagttgattctagacgtaatcttgaatttgacgaatctcacgcgtgccatcattccgaattggatcaatcagttgttggaaaacaaaaacttgattacctttgttgggatgttcgtcgtcgccatgttgttgtattactttgtaccgaacgccaaggtaaaattgcgttacatttggacgggggcgttagtcacgacgattggttggatcgtgatctcgcaagggttccgggtgtacatcgaattatttgctaaacggattacgacttaccaaacgattgggagtttaattgtactgatgttctggttgaatttttccgggattctcttgatgtttggtggtgtcgtcaatgcgtcggtgcaggaatggtttgagcataagattgagccaaagtctccacggatgattcgtcgcattcggcgacaattcttcaaacgcaaaaaaacgactaaaaaagaataatcagaaccttttaattgaatccggacgtttaatcctgtaaaatcaaaactttttgcgatttacatattaaacgattcggattttgtgtataatggtgttcgtgtgaaaaaagtgccggtgctttctgaaagtaagtggcgtctatttcaaaataaacaggcgtaacaacgccacaggaggagaaagatagtgattcatcagcttttggcagagttcatgggaaccgccttgatgattatttttggtgtcggtgtacattgtagtgaggttttaaaggggaccaagtatcgcggttccggccatatcttcgcaattacaacatggggttttgggattacaattgccctcttcattttcggcaatgtctgcattaacccggccatggtattagcccaatgtattttagggaacctttcatggtcattgtttatcccgtattcagttgcagaagttttgggtggggtcgttggtgccgtgatcgtctggatcatgtacgcggaccattttgccgcttctgctgatgagatttccccaattacgattcggaacttattctcaaccgcacccgctgtgcggaacttaccacggaacttcttcgtcgaattcttcgatacatttatttttatttctgggattttagctatttctgaagtgaagacgccggggatcgtgccgattggtgttgggctcttagtctgggccattgggatgggactaggcggcccaaccggattcgccatgaaccttgcacgggacatgggcccacggattgcccacgccatcttaccaattaagaacaaggctgacagcgactggcaatatgggatcattgttcctgggattgcacctttcgttggggctgcttgtgcagcgttgtttatgcatgggttctttgggattgggtagataatactataattattttggacggctattgtaaaaatagtcgtcttttttatcgatgtttatacaacaatataacgattgaccttttacattaaaatttttttgatataatgacatgatgagactttatattcttggaggaaattaaattgagtaagtatgattatttggttgttggtgccggacttttcggtgcagtctttgcccatgaagcagcattgcgtggtaaacacgtcaaggtgattgaaaagcgggatcacattgccggaaatatctataccaaagaagtagatggaattcaagttcaccaatatggtgctcatatcttccatacttcggataaacagatttgggagtatgttaatcaatttgccgaatttaatcgttatacaaacagtccagtcgcaaattataaaggacatatgtataacttacccttcaatatgaatacgtttagtgaactgtggggagttcggacacctgcagaggcacaagcaaaaattcaggaacaaaaagacgctgctcagttaatcggcgaacctaagaaccttgaagaacaagcaatatcgttgattggtactgatatttatgaaaaattgattaagggctacaccgaaaaacaatggggccaaaaggcgaccgacttaccagcatttatcattcgtcgactgccagtccgctacacatacgataacaactacttcaatgatacttatcaagggattccaatcggtggttacacgcaaatcgtcgaaaaaatgttggatcacccagaaattgatgttgagaccggtgtggatttcttcgccaataaaaatcagtatttagccgactttccgaagatcatatttactgggatgattgatcaatacttcaattatcaattaggagaattggaatatcgttctttacgatttgaaacggaagaacgagacgttgacaactaccaaggaaatgctgttattaattatacggatgcggaaacaccgtatactcgaatcatcgaacataagcattttgaatttggaaaaggtgacaagggtaagacaattattactcgtgaatatccagctaactggaaacgcggagacgaaccatattatccagttaataatactcgcaataacacgttgtataagcaatacgctgaacttgcaaagcaggagggcaacgtgatttttggtgggcgcttagggcaatatcggtactatgatatgcaccaagtgattcatgcagcattagtgacagttgataacgaattataaaagggtgaacagttttttgtgtgaaccggattgcttgcatgctttgggttacttgttgtctggcaaactagcaaaataaactgagatatgtttgaagacgatacgcaatcacaagattggtgtatgagaatgcaaataggaaggtttatcactttaatgataaaaacaatggaattctattgagttataaaaggtcttaaatcgagatgtttcttggttgataaatgcagttgctttgtacgtagatactggcttatatgctgacgtgccgagccttttaggaggaaaagatgaataatattgttggttggaacgcaaagataggttacagattttttaaaaaatatacattaattgtagtgctagtcggattgatttttgggattgcatcggcgctttatgtggtaaaaactgagccagttcaatatgagtcaactgctcagctggttcagaatgataacaattatgatttgatttcatcatatcaacaatttattaaatcaaataaatttatgcgattattagacgataagattgcgggcagcaaatggaaaagcaaaaatattaaatatactttgaatgtgagtcagaacggcagcaattcgccttttttttcggttaatgtaaagtctacgaatggctctttttctaattttgtggcaacacaatcagtacaattgtttgtgggaaatgtatctaaatatttgtcctccgcaaatgtttcagttttgtctataccctcaagttcccacgaggataatttcaaaagcagaactgcgaaaagcggtgtcttaggttttatatttggtgcatttctggcggtagttctttcatttttgaatatgactatatggggaaaggttccagatgaaaagtatattaacgacatgtatgatctgaaatttcttggcgtgtatcgcgagaataaggatgatcggaaagaaagtgagaagtaatctgatgaatgagattaagcaaataattcgtcgaatcaacatgaatgtttccagctccaaacaaaatataaaggtattgtcttttgtgacggatatggaagaaaatattgaaaaaactctcattgtgaatatggcgatgatgtatggctttgctggaaaaaagacgttgattttagataccgatttcgggaatgaagcaattgcacatacttttcatattgattcgaaaaatgggctttcagattatttagaaggaaaagtcactgaattatctaagattgaaaaccaaattcaaaacaaaaacataagtattattgctgctgggtcattagcaaaagctgaaactgattacttaattggtgacccacggtttgaggagttactcactaagttacgatcagaatacgatactattttaatcgtaactcctcggttccaaaatcaggctgtgatggaaaatattcttcataagtcagacggggccatactagtagcatcaactggcaaatcaacaaaaaggaaaatgtataagctaattaagtcagtttcacaatcagatactgagttgttaggatatgttgcagtgaagaggtaagtacatgcagaaaaaaaatctctttataacaattctggtatttatagtctgtgtattaaccattgggttagtgttgggtgttcggaattatgaagaaaagagtaccatcaattcaaaaacaggcaccccaaaaagtgatttagcggttaatttagctgagcgcactaacttaggttataacaatatgccagaaagccgaaagatcaacgttaccaaagtttatgactccatgcaaaaagatagtttttttggcatgtatatgggtattaaaaataaccaattaattttttctggatcaaacggatattcgaatgcaagtacagggaaaaagtttaacgtgagttcaatgtttaatggtggtaagtatcaagattatctaaatgatgcaatattaatcagactcattgagaaggggaaaattaaagagacagaacaattatcaaggtatattccgacgctcaaggattatggagatatttctgtacgacagtttttggtgaatggttccggtctttatgtttctaagaacagaataaaatctgacagtggcatgacgctggataatactgcttataaaaaaagtactgctaagaatctagtttcagcggatgcatctatcaaggtccaattgattgctagtgtaacgcaaacttcctatcgttcagcattcaagaagctagttattgatcattttgggttaatgaatactgaagttcgtaatagcacaaatcaacaagaatcaacagatgtggttgggtacaaatatcataagaaaaatgggttacctgatcaatcaaagcgagaaaaacagcctgtcgttcttcaaggtgtaaatcagctaaaaatctctgtcccagatatgttggtgacttaccaagcaatctcgagtcagaaatatttttcaaaaaaatataacaatttatggcgagaggctttacggaactctaatctagcaatgatcacgacgggcaacagtagagaaatcaaaataatggaaggcaaacagcagattgttattcgatcgaattttaaaaagaatacaataattgctgttgcagaaaattttccaaacactaaaatgactacagcgtcattattaaagcgtctaagtcaaattctggattagtgattgatagtgatagtgtgttcaatgctgcaagaagtaggataccaggaggagataatattaaaataaagattttagttgcttcacacaaaagatttccaatgccaacggatagtgatttgtatttaccagtcttggttggggcagcatataactataaacccggaattgagtatcaacgtgatgatttaggagacaatatttcaaataaaaatcccaactataatgaattaactgcagtatattgggcatggaaaaacctgaaagatgtggatgcaatcggtttagtacattatcgtcgtcttttttcgcgtggtggaaagaggtctttgaataatgtggtcaataaaaaagacattgaggttttattaaatagagtgggtgtaattgtcccccaaaagagacattactacatcgaaagtaattatacacattacgtgcatgcccatcatgcattgccactagatgctacgagaaaagttttggaaaaagaatttcctgattatatttcaggttttgatcggcagatgaaaagacatagtgcgcatatgtttaatatgtttattatgaaaaagatgtattttgatcagtactgtcaatggctgttctctgtacttcaatccttggagacaatgattgatatatccgagtacacaccacaagaagcacgtgtgttcggatatgtctctgaattgttactagacgtttggatagatacaaaccatattaaatatgaagaactaaaatggcagcaaattggggacagaaaaatttttttgaaagctattaactttttgaagagaaaatttttacctaacagtgaaaaacaaagtcacttctagtaaacagggaggggagagacatggatagtagtccgttagtgtcagttgtcataccggcgtataatgttgaaaatgaagttcgtaaatgtttagaatctgttatttgtcagacgtatcaaaacttggagattattgttattaatgatggctctacggatcgaacggggaagattataagagagtgtttacgtgatgtagatgaatcgtttatttatgatgtttcaaatggaggtttgtctagtgcacgtaatattggagtcaaacatagtcatggcgacttgataacgtttgttgattctgatgattatattgatgaggactatgttgcatatttggttgagatgattctaaacttcgatgttgatattgcgagttgccaacatcgtattttattggatgaaaataaatgtactgatctgcaatttaatggaaagccagaagtttggagtagtcatcgatggttgaagggcgttttggcgcgtaatactgtggatttatctgcatggggaaagatatacaagcgttctctttgtctcaagtttccctttcctactggtaagttatatgaagatacttttacaacgtacaaagatgttcttgaagccggttgtattgcagtcggaaatgagtcaaagtacacttataagattcgtctaaattcaatttctcgttcttccttctcaaaatcctctttagatttgattaaggcaaccgaaaaaatgacggtagacacacttcgagtctttcccgacttaaagcctgaagtaagactgcgtagaagttgggcatataccagtgtcctaaatgctattttgacaagcaataaggaaaatgaatatactcaactcgtggatgatttgagagtaaatattattcattctagaccggtgattctttctagaaaaaatattgataggcgtctgaagcttgttgtattagcattgagtgcggggcttagaccgtatatattgttactgaagttgaaagcacgcttagatacagttaatgcattgagagggtaaatctttaatgaatgaaaaaattgattttgttgttacgtgggtagatggtgcagataaagtatggtaccaaaaaaaacaagaatatcagcaaattgttaatccatccaaaaagttaaattcagcaagtcgatatcgagactacgaaatttttaagtattggtttcgtgcagttgaagtatatgcaccttgggttaataatatatttctaattaccgataatcagattccaagttggcttgacacgactaatcccaagttaacttgtgtttcacatactgactatattgatcagcagtttttacctacgttcaactctaacgtaatcgaattgagtattgcaaatattaaaaaattatctgaacattttgtattatttaatgatgacatctttttgaatgcccctgtagagccaactgatttctttattaatgggttaccaagggaaacttatgcagagagcccgattgtttcgactgagggtagtggtgcacatatcatggttaatgatatgcagatcatcaataccgagtttgataagagaaaattctataaacaaaatttcaccaaagttttcaattacaaggttggcaaaaaattactaaggacgcttgcacttgcaccttcaaataaatttgttggcatgtggaacactcatctgtccgcttcgtacaaaaagagtacttttaagaatgtttgggcaaaatatcctgatgaattaacatctacgttatctcataagtttcgcactccaatggacctcaatcattggctgatgagatactggcaattggcttctggacaatttgagattcagtctcctaagtgggggcacttttatcaattaagtgatacttctatgaatgaaatcgagaaggaattagataaggaaactcataaagttatttgtttgaatgatactgatgacgtaaagaattttgagcagacaaagcaatctttaataagtttatttgaagaaaagcttccgaacaagagtagttttgaaaaataatcgtatgaaagtagagaaaatcgtgaacagatatatagttaatataaataatggtcagaaaaacacagccggtatcaaggctaagcaagatattgctgacattcttacaaataatgggtatcagcaattgagttttagaatttcaaaatcaagacttgttaagctgttatctacaaagtcaaagataaaaaaagttttgaagccagttcacactggagatgttctttttgtgcaatatccgttatatagcagatactttttgcgacggatgcaaattgctgcaaaaaagaaaaatattaaattagttggaataattcacgatgttgaatttttaaggaattatttgaatgatgaggaaaaaagtgagtctgagattgctctgtttaataattttgatattctgattgcgcataatgataaaatgattgaggcgatgaaatcacgtggggttaccactagaatgttgccattagaggtgtttgattatttaagtgaaagcgatcttatttctccaagccttgataaagagttattgtttgctggcaatctgaaaaaggcaccgtttttagactcttggaatttagacatcaatataaatttgtacggtgtttttcccagtaatagttatggaaggcacgttcattaccaaggtgtaaaaacaccagatgagctgcctgaatttttggatggtagttttggcttggtttgggatggtgaccgtttggaaacaagtagtggtgtatatggtgaatatacacgctataataacccacataaagtttccttatacttgagtagtggcttgccagtaattgtttggaaatcagctgcgatagcaacatttattcaggaaaaccatttaggattagtagttgaaaatcttgaaagcttacctaaacttgttaatcaattgacgaaatcaggctatgatgagatatgctcaaatgttagaaaacaagcgctattgctgagaaaaggacattatacgctgaaagcagctgaactggctatcacgaagctaaatgtttcaagataataagaaaatcaacttatcgttttattgattctttgtgttgtcggtttaaggaaagaggtgaaaaatgttagagttattattgatattattatttgtgttattaattattaactacgcattaggaaagcgggaaatcctgtcaccagcttttttgttcactctcggttttctggtctctgtagcatgggcatatgccttcagagataaatggggattgaatctcaaaattgaaacattctgggttattttaggtggtgtagggttattctcaatagttgcagctattgtaagtattttttttatgaagcgtacgttaatagagggactcgagtgcgataatcgttatgagatatccgtcagtcgtaccggtggaataattattataggaatcatgcttgttacaatcgtatatacggtgtttgaagtacaaaagattgccccgtctggtagcataatgggttcgatatatgcgtatcgaatgcaaacaacaaatatcactacagacaatgcgagttcgttagtactcccgaaattattagcattgttacgtaattttacagatgcagctgggtatttttttgcctatatattagcaaatgagctttttaagagaaaacgtgtgaatgttgttgccttagtgattacttttttgagtcttattaatggtatgttattaggttctcgaactggtgcgtttatgttattattaagtttcatgatctttttatatattatgtatagggcgagttctaactggaaaaagcatttgtcattgaagatgcttgggatgattgcattactatttataataattatttttacatttcaatcgtttgcaggtttattaggacgggaagttggttcattttcaaaagcaaattatttagctatctattttggcgcagagataaaaaacttagatacgtttatacaagctggccaatttccaattcgtccgcatggtacatttggtgcacaaactttcttagagtttaatagaacttttggtaagttctttggtagcaatgcaactgtaatacttgatttaccatttcaaaatatcaatggtttaagcttgggaaatgtgtacacaactttttatgccttcttgtatgacttcgggtatagaggagttgtactgctggtaatactcatgtcgtttgttagtcaatttgtttatgagaaagttagacattttactcgacagggagatatttctatttacacccttatttacagtagaatagcagtttgtttaatcttgtcatttttctcggataagttctacgagggaatatttgcaattacatttatcaaaacagttgcttggtgggtggtattgcgttggatctttgttagaaatagggtaggaatactgaagtgactgataatgtttagaactagcggatccttgaatattgagtactactggttctaaagtgttagtagtaaaaaactgaccggatggttttattctttgcaaatcacctttaacataaaaagagttccggcacttctcattttctgggaagtactggaactcttttgtcatacggtgaatgtcgtcgcttgcgatcttcagcttttgatcataatcagtaaataatagacgtattgtctgcttatttatttcctcgttctaaatgcttttactttatagataatcgagggttgtagaattagtaaaactcctacataaattaacaggcccactaatatttccaatattaaattgagagtagaaatgttcattgttatatttagaatgtacacaggaatgaacattgtaacccctgcaattagatatttaaagaaatttacaaacagcgaactaatgcgtaacgactttctaaccatgattaattgatataaagtgaccgttaattcagaaagtaaggtggcaaccatggcaccgtaaacaccccaacggagaatgagcggaatattgatgacgatattagttattgcaccaagtactactgatgtggtataggtactcatttgttttgtgggtaataagtattgctgcccaattacgttactttgaccgattaagataataactggggattcaattattagcaaaatatttacagaagtgaacgctttcccaaaaaaccagggagccaacgcggttgccacactagcaattccaaaagccatgggaattgaaattgcgagcacaaaatcaaatgatgtgtataaatattgtttcactttttcaatctgtttatttgcataaagattagctacgtgaggtagcataacagtacctgttgaagtaacgatggcaagaaccagttttactaatttatcagaataatcatagtaacctgaggcagtgacggagcttaatttccaaagcatcgtcttgtttacggctaagtaaatagttgttgcaacctgtggaataaataaggccagagaaggttttaaatgtcgaaaaatcttcaaatcatgtatccttggtgcatacacaagtttgggtaagtatggccataaggtaatgttgccaagtagttgtgatagtgacaagattaaaatgtagatacctacatcctgcctagttttgacaaagatgaatattgaagcgagagatagtaacttgacaatcatattcctaataactgtttttttgaagtcttccagtcccataaaaaaccaggaaatatcaaaagctcccgcaataatcaaaaaggattggtagaaaaaatatattttcagttgcttttgtaggtacagaaatatacaaaatgcgaggtacgcaagtaagattgttgtaatctgcagaaattcgatttcccagaaagtttgagatctctttctatgatcatcccttatgaaggcaatttcgcggtttccataaattgttatcccaacagttccagcaagcaaaaaatatgtaatgactgaattagtagttgcgttaatgccgactccggatgggccaagcactcttgaaatatacggaaccgttaataacggtgtcagtaaaattagaacattgtaaccaacattataaaggtagtttttgacaattttcatttagatcctcacagtagttatattaataagtataatgcgactgaataattatagcatatttatttattaataaagtgtgtttctggcaatcgttgattacaaattaaaagtcatcgcaaattattgattttgcgatgacacaaggatttgaacgtattcaaatttagatattataaacaaaagtttgaaaatataatttgattattttgttgcctgactataatgttgggtgcggaaattaatagtgctggatgatctgaatctagtacaagattattatttacctgaatgttgtgcatactacttttatggttgctattctctaaaaagatatactgtaatatagggttaatattagtaaagacgttgtttgaaattgttatcccggacattgtatattcatttagtggatttagaatgtggatatagttggaagggccggaagaatgaatattagtaaaccggttgtttgcaactgtgagattttgaatgcctaagaaatttataacgcctgcatgagcacctgttcgtggcttcggatctacaacatcattgttgataaaataaatattgtgaatcaggccatttttactgtttggatagaatgtgtgctcaccaataggatttggtgcataatatttgattgatgatttattgagaattggtagaaaccggttgttgatgatggttacattataggttggtaaatcatcatacacgtccctgggctgaatatatgacattccagctcgatcagagtaatcgatttgaattgcttcgcgaaaatcattattgggtgcagcattgaatccccaaaagtttgagttacttattgttatattatgactaccatcagtgtctagatagtgtccgtcaggtttttctgcattatagaaattacaattgttgaatatgatgttttgggcatgattgagactttgagtgattgagctttgaccgtggatattattatttcctttaaatgttgcattttcccatttgatatcttgaattcctccatcgtatccagcacgaggactggggtaaacgaaaagaaatgcttgaccattggttgcctgaaaaatagctccagtttcaaacttgaaagttagatgggagtgcaaaatgacacccccgcctgtaaagttataagtacctttgggaacataaataacagctttaggatctgtttgtgtgtcaatgattttttgcaattgtcgattgttagatgtgctgctagttgataatcccgcacgttgtgcattaatggttgtggcatgaactgagagtggtaacatgaaaactataataagcataaagctagtgaagaacatggtagagatataatgttcttttataatatttttcataagatgcatctccccgattgaacaataatataactgtaattaattataatatattgtttaaaatataaaagtaaaaattaatgttgaatctggatattgacataatttagagtattagtatatacgtataattagtgttctaaccaaaagttatcggtaggcaaaacaatttgttgtgcatttagcatagaatgaaggggactatatgaaaaaattattaatcacaggcggtgctggctttattggttcaaattttattagatatgtatacagatatcacccagaaatacgaataatcgtgctggataagctgacttatgcgggaaattacaaaaacctggctgctcttcttggtgatagggttgagttagtggttggggatatcagcgatcaaccattagtggataaattagttgaaagatccgaggctatcgtgcattttgctgccgagagtcataacgataactccttgagcaatccctggccttttattcagactaatattattggcacatatacgttaattcaggcggcaactaaatatcataaacgttttcatcatatttcaacggacgaggtttatggtgatttacctttatctggaagtaatgaaaagttcactccaaccagtccttatcaaccgtcaagcccatattctgcttctaaggcaagtagtgatatgttagttagagcctggattcggtcatttggcttgcaggcgacaatctcgaattgttcaaataattatggcccatatcaacatattgagaaatttattccacgtcaaattactaatattctgagcggacgacgcccaaaattatatgggagtggtagtaacatacgtgattggattcatgtgaacgatcattctgcggctatttgggatattttaactaaaggaaaaattggtgaaacatatttaatcggtgcaaacggtgaaatgagtaataaagctgttttagaaatgattctaaagttaatgaagcaaccccaaaatgcatatgatattgttaaagaccgtcctggtcacgatttacgttatgcaattgatgcatcgaagattcgtgatgaattgggatggcaaccgttatacactgattttcaatctgggttgcaggagaccattaattggtatatggatcaccaagattggtggcagatggataaaaataaagttgagatgacctatgctcgtaacaatcaataaataatgggtttgtctgatatcattataaaaaagacaggttaaactaatcgtaatagtttaacctgtcttttgattagaggaggtggctttattttgagtatcaatccctaatgagaagcccgccatttgttttaaaataagatcctgattgagcccaatataccgctttgtaattgcttcactagaatgattgaaaatcatcatcaaagttccaatatcgtgggtttgctgataataatggtagccaaaagttttacggagtgtatgggtaccgatatcggttcggtgcattttacgggcgatggtttggaaaagtttataaacggcattaacacttagcggctgatgttgtcgattggtaaaaagatattcattatctggtaaatctttaatatagtgattgatttgtggacgtaggcgtgtgagtaaaatcacacgcctttttttggtctttttttcagtaatgtggacaatatcgtgatagcgaatctgtccgacctttaagttaagaatatcgctcattcggagtccagtatttaaaccaattagaattaacaacgcgttacgctcaccgtgcgtaccgttccgagccttattaacgaagtcagtgatttcttcattggaacgtaagggctcaacattgtagtaaatattaatcacactctttcgtgggacgtactaattatgactattaaacattaattataaaccatattaattaataaatataatcaaacatctagtacaatacccgattacacgaataaacggcactattttaaaaaaaataatgccgtttcaacacaatctgtaatcaaatataacatcacatcaatatttgtcaatgtaatatgtcattttattgtatgtaaatagttgttttcagtgcagcatatacaagcttatacaaattttatggaaatcgattcgaagcattgatgcaaaaggaatctttctttttattttaatgacgttacataaaatgtggttttaatctagttaattttggagagtgaatgatggatcaagcagtaagttttgacttttttatccggcttgtccgtaagtactggcgtgcaattgtcagttttacggtggtgggattgatagttgccgcagggttgaccttctttgtaattacgcctaagtaccaatcgagtgttcagattttggttaaccgtaagaatactaatgccgctactgagtacgttgggcagcaggctgacgttcagatgattacaacctacaaggaactaattgctggacaggtggttttaaaaccagctaagcaacaattaagtaaacgttatggtattgagcgcttactgaacacattgaaaagtgaagttagtgtgacaagcacgaccaactcacaggttttttcgattgccgtgactgatgctgatgcaaaagctagtgcgacgattgctaatcaaattgctcgtagttttaagaatcaagtacaaaagattattaaggtcaacaacgtcacgattgttgctccggccgaaacgccaaatggcgcagtatcgccgaagaagccgctgaatatgttgattgggctagttgtcggcttactattaggaattgtttatgcagcgattcggatgctcactgatcgccgcgttcacgacgctgatttcttaactgatgaattaggattgactagtttaggcttggttaaccatcaacatcaccattcaatgaagaaacaggccttgaatctgaatggtggctatcatacgcataatgatcgaacatcgtcacaagcgatgaaacgagtttaggagggtgttagatgtttaaacgtaaagaacagaatataacgactacggccccaattaatctcacgacgattaatgaaccaatgtcggtcattactgagcagattaaaacaattcgaactaatatcaattttgcggctactgaccataagctacgaactttgatggtgacttcggccatgcttggcgagggtaaatcgacagtaagtggtaacttagcagtggagtatgccaaggaaggcatgcaagtcttactggtcgatgctgacttgcgacgaccaacgattcataagacatttggccttaaaaaccataagggattaagttcatggttagccaatcagatggacgatgtgaatgatgcaattcatcccgtcattggcaatctatttgtgatgacgagtggcccgaagccacctaacccggccgaactgttgggtagtaacaaaatgaccgagtttttaacttcggcaacacgtaaattagatttggtgatcgttgatgcaccaccaattttgccggtgactgactcacaattgcttgctaataaagttgatggcacggtcttagttgttcgccaaggtgtagcccaaaaagcagcggttcgtgatgctgttaattcattaaagaaatcacaagctaacattttgggtacagtgttgaacgatgttcgtgatagctctcatcacggatactacggctataacagtggctacgggtattacagtgatgaagataaataatttagttgacttacattgccacatcttaccagccattgatgatggttcaccttccttagaagcgtcattggaattagcacgacaggcggttgctgatggaattcgttatattttagcgacaccgcatcatatggatcgtcactatctcaatcatgccggtgatgtggtagcggcggttgaggcatttcaagcagagctagatgtaaatgatattccgttaaccatttttcctggtcaagaggtacatctaaatggtcagttgatggaaaaagtggacgatttgttgggtatagataccggtagacactatttattgctagaacttccccacgagatggtaccaagttacttggatgagatgatttttcaattgtcttgtgaggggattaccccggtcattgcacaccctgaacggaatgctcaaattattgccgaaccgcaacgattatacaagttggctgaggatggggtcttggcacaggttacggccacgagtttagttggtacttttggggaacaagtgcagcgaactgcaaaagaattcgttaagtgtggtttggttcaagttgtcgcatcagatgcacatacgctgaaaaatcggggctttgctatgaccaaggcctacgaagtattaaatgaaatgaattcgaaatatcctgaacgttttgcaaccaacgctcgggatttgttgaatggtgaacagattgatattggcggaattgaaataccacgaaaacagcgaaagcactggttgttctagaagaaggagcgagttaaatgaaagcattggtaactggaggagcaggatttattgggtcccaccttgtggaccacttggttgcagaaggattggatgttgtcgtagttgataacttgtccatgggggacttacataatgttaagcatcaggatgaagtcaccatttatgtcgaagatgttcgcaatgaaaaatttatgcaacaattgttacaggaagaacaacctgattatatttactttttagcagctattgctagtgttgccgattcgattgaacgtccagctgaaacccattcagtgaatcaaactgcagtatttaatatgttggaatatattcgaaagactaatttaccgattaaacagttcctgtttacgtcttcggcagctgtttacggtaatttgcccgaattgcctaagaaagaagactcacgagtcgatccattatcaccatatgcgattgataagtatgctacggaacgttttgtactagcatatggtgaactttatgatttaccaactgtctgtgtgcgtttttttaacgtttatggtcctggtcaaaatcccagttcgccatattcaggggtgctgtcgatcttgaccgattgtctcaataacaagaagccatttaccttgtacggagacgggagtcagacacgagattttgtgtatgttgaagatgttatccaagcgttatggttgataacgaaaagtgatactgagcatgaagtctttaatattgccaatggtaatgaagccagcttaaatgccattattgaaacatatgagaaggttgcaggaacgtcattgcagattaaaaaggcgccagggcgtgaaggggaagtaaaacgttcggtggccaacatcggtaagttaattaagttgggatacacgacgaagtggtcgttagaagcgggcttgagcaaatattgggaaggggcgcaacaacgtgaagcaagtcgaaattaatgaaacagttaaagtcggtcatgtacaaccacaaacggattatcgttttccaactatgattggaaagccagttacgggctggaaaatgtttgtaaaacggatttttgaccttactgttgggttaatcgggacggttttgagttcgccaattgtcctagtgtttgccattcttgtaaaactgacttctaaaggaccagcattttataagcaagaacgggttggcctcatggggaagagtttcaatgtaattaagctgcggtcgatgtatcagaatgctgaagcgcgaacgggtgcggtttgggctcaaaagaatgatccgcgaattacgcccattggtcggtttatgcgaaaaactcgagtagacgaactaccgcaattttggaatgtgttaaaaggtgatatgagtttggtaggaccgagaccagaacggccagtgctgacagaggagtttagtcggcaattttcagatttccctaaacggttacgtattattcctggtattacagggtatgcacaaattaatggtggctacgatattacgccagatgagaaatgtaagctggataattactatattgaacatttttcggtttggttcgatattaaaatgttggttggtactgtcaaaattatttttactggggatggggcgcgatagtgaagattgtttatgtaattacgcaggcaacttggggtggggcgcaagctcatctatatagcttaataaagtatcaggctgcgattggtaacaatatcacactggtttgtgggagtactggacggttaagtgaacaaataaaaaaagagttccattctgttgaggtaatctcaatttctagtcttgtacgtcgtatttcaccaattaatgacttaaaagccgtccatgcattaagaagattactgcgcaatatacgaccagacattgtgcatttgcattcttcaaaggctggtatggttggaagatttgcagccgctgggttgtcaatgaaagtgatttttacagtacacggatggggattcacaccaggtgtaggcaccaaacgtcagattttaatgaaatatattgaaaaaatattacagccgctgacaacatattatatctgtgtttctaaatttgattatgatttgggtgtgaaaaatcgtgttattacagcaaagcatccaggattcgtcatacataatggcgtttcagagttgagttttccagtaaaaaaacgggagtcatttgttttgtcgatggctgcacgttttgatgtgccaaaaagacaagatgtagtgattagagcattgtcgtatatacctgatgatgtcccgattgtatgtaattttcttggtgatggtcctcttattcaagaatgtaaaagcttagcccaaagtttacacgtcggttcaaaagttaaattttatggtgttgttgataatgttcagaagtattatagccagtcagatgcggccattttaatttctgattatgaagcactaccaatcagtttagttgaggcgttggcacaaagtttaccaatagttgcctctaatgtaggtggaatcaatgaattgatagaccgtaatggctttttggttaagaatgatccccaagaaatttcggaaaagcttcttttactatacaaatcaaatcagattgatgaaataaagaataattcttatgagatgtatcaacgacattacactgagagtgaaatgcttgaagaaacacaagattgttatttgcgatgcctggcataatggaaggagagtattgccaatgacaaagattgtccatgttttattttcttccaaattaggtggagctgaacaagtcgctattaatattagtaagaacttgagtggaagctataattttgtttatgtttctccatctggaccaatacaggaaagtttgaaaactttgggaattcagtatcaaagctttacccctaaaaaaatttgtgaatttaagcataagattgaagcacttaagccagatattatacatgcacatgattttaaggctagctttttagtcaacttactttttaataatattccgattattacacatatacatcaggcacctaagtggcaaactagctacaattggaaaagcattgcttttcaatatatagcaaaaaaaagttcacagataatatatgtttcagattgggctaaagagtcctatgtttttcaagataaactaaaaaatgcatccgttattcctaatggaattgatactttgcatgtaattaaaatgtccaaggtgaaaacatcaacggtttttgacttattattcgttggtcgtctcgaagcggttaaggatcctgaaagatttgtgagaattgtgaagcggttattgaaaaaaattcctgaattaaaagttggaattgttggagatggcaccctaaaagaacgtataagtgagcagattgagaacatagcacaaattgaattgttaggcttcagcagtaatccatacaagtatatggtaaatgccaaggtggtgctatcaacttcaaagtcggatgcctttggactaacgatggttgaggcggctttacttggtgcaattccatttgccccaagcatcggaggaatcgcacaaactgcctccaaagtaaatggaattgtctattccagtgatgatgaattagtagaattattattccgtgttttttcagatgtagtattttacaaaaaaactacatctgaaatgtcgaaagtcgaaatgaattattatgatcagggaagatttattgagcagatacgacaagagtatgaaggggtattgaataatgggcgaaacagataattatactggcggaatgcttttgaagcctcttttattcattactggtttttatttgatttatcaacccaatttttggacaagtagctatgttcctacggtaattacgctagggattacaattgtttttatcatgatgttgtcaccttatgaagtgttgagaagtatatatcaattaaaaatttttgtgattggtgtgatattgtcgctgggatactttgcttttagagcgatgctatctggaaatgatccacgtgtttttcaaaatgttattatcattctaaatgttatttcgctagtattatggttagaagttctccgcaagtattttcactttacaaaaaatgatgtattaacttggatgctatggatggtagttgtccaatgtttttttgctctgataatgctggcaagctcaggcatacgggcaactattttggcaaaaacagccactaatattattgataatcagtttgtttatggggaacgactatacgggattagtagtgattatactttttttacgccgatatatcatagcataatgggtttaatttcagtatatatgggaatgaattttcaaaaaaagtattatatgtttttaccgttttgtgtatttattattgttctgaatggtcgaactggactaataacgttagcgttagggtttattcttatattaatgaaacgcatggtaactagttttgttggattgtttcaggtcgctatcattgtactagtaagtgttggctttatatttttgggattggaatttttacagtcaattcagcctgatacgtatacctggattgtaactggttttgaagatacacttgcactgatatttgaaggtagcaagcaaggtaattatgaacaacttactggttcatttttgatgtttccgagtggacttgtatattggatttttggatacggagttcgagtatacgctggaaataaaagcaatatttggttcggaacatctgatattggttatattaatgatttatttatgggcggaatcacatatatgttcatattgtatagtacgattgtttcttatttgatgtcatgtaataggaagtctggaacaatagcacgcagtagtatgctttttctggcttttttgttggtgttggtaattgcaaattataagggtgaggcatcgcgaagtggaatggtattgactgcaatcatattcatgggctatctattttctactgaaatgactaataaggagacaatatggaaatcagtgtaattatgagcgtttataatgagcaatctgaacaggttagccaatcgattgactccatcttgggacagacctgtttgccggccgaattcgtaatcgtacttgacaatccaaaacgaaacgatttaaaaaaattattaatggcatacagtacacagattgatattatcaaagtagtgttcaacaaggaaaatattggcttggcagcgagcctaaataaagcaattaagttatcaagcagtgaactaattgcacgaatggatgccgatgatatttctgaatctagacgacttgaactagagttaaatgaactagagcgacggagactcgatttaatctctggaaatattgtgtacattgatgagggtggaaatgtaatcggagagaaatcgatgattccagaagatgagcgactgattgaaaagattctgccatatggatcgacaattattcatccgacagttttgatgcgcaaagcagcatttaatcgggttggtggatataggttgctgacaactgctgaggactatgatctttggttgcgaatgattgctagtggattaaagattggctccatcaacaaccgagttttgaagtatcgcttacgtgataacagtatgactagtaatgcatggaagacatatattgtaacgaaatacattcaaaggttatatgcacagcgaaagcgtacgggtaaggatgccttcaaacaggatgatccacaattgctggtcaaattaaatgatgagactgctcgtcaaaaatttaatcaaggccagaggcattttacaaatatgatgctaaacttgaaagaacgaaaaatttggtgcgcattttatcaactgtcacaggcaatgtttacgactcgagataatttttgctatattgctaactatttacggttaaggatggtttgggtagtgaacgggagacgataccaccatgtataggctaattaagaggatgattcgaactattttgagtaatctttggttgaattatcaatatatatttagacaaaagcaggtagcggtaagtgtaactaagcgtaatattattttatttggggttcccaattatcccaatcttggtgatcaggctattcttgttgcagaaaaaaagtttattgaaaagaactttccagatgcaaatctaattatgatttctgagactgatactgctagttgtctttggcagataaaatcagcaattacgagtgatgatttaattatgtatcaaggtggcggtaatactggttcgctatatccattatctgagcgaaatcgtcgtttcttgataagaaaaatgaataatcaaagaataatcatatttccacaatcaatcttttttgaggataatctggttggaaggtatgaacaatgtttgagtagcaaggtttacaagcaaaactcgaaactgactcttgccgttcgtgaaaattattcattgacacgtgcaaaaattattttcccaacgactaaatgtattttagtgcccgacatagtcttctctttaatggggacattatccaatcaaccagttcacaaattgcctcagaaggctttgttggtattgagagatgatgaggaaagttgcttaactgcaccctttaagtcagaactgactgcgatgctaggtaaacgtttcagcactataagtacgacggatacgatggcacaaaatgttgatgttatcaatgatgttaatcgaatgtcattgttgaatgaaaaatgggcagaattttccgaagctgatttggtggtaacggatcggctacatgggatgttgtttgcaatattgactgagcgtccctgcttagtttttgcaaataataaccacaaaattgagtcaacaatttcaacgtggcttcaagatacggaacgaattaaattggtgaatactcgctcaatgcaagcgattgaaaaagtgattgatgatttgaaatggcaatccaaagatgatttgcgtgagctggaacaaaaatatgtcccgttaaaaaaggttatccaggggtagtggcataaggctgtggtagtcacatgtttatatggagatgatggaggcttctaaagcttggtaaatgcaaaagcaaaaaaattaatcaataatattggtatatttgcaatcggtaatcttggtagtaaattgataagttttattttaattccaatatttactagatatatgagtagcgctgagtttgggcaagttgatttaataacaacaacgattaatatgttgttaccggtagtcgcgctcagcattgcagatgcggtattcagatttgctatggatagaaaaagtgataaagtagcagtatttaccaacggactgacattcgctattttgatgatttttattgcgggattagcatatccaatattattcgcactaaatattaactatgcaaaatacattttaatttatctttgcgtgggtctgatacaaagtttgctacaaaatttcgttcgcggagttgggtatgttaaattatttgcgttaaatgggttgataagttcccttagcttggctggaattggattgattagaatagtgttacaacacggtggtgtgagcgggtacctggatgctttgattatatctaatgtggcttcaatcattttcttaggggtttttggcaaaatctggacattttattcaatcattacactaaataaatcgttcctaatgctgatgttgagatatagtatcccactcatccccaatgcgtttttatggttcttcactaatgatgctagtcgtttttttattgtcggaatacttggattaacggctaatggactctatgccgtggcaaccaaaattccgaccattattaacgtgttttacaccgttttttcacaagcttggcaaatatctgcggttgaagagtatgaagaaaatcgccatggccatttcttttcagatgtatttaatgccaacgctggtttgtcatttgtgctgattggcggcatcattgtttgcttgaaaccgatcatgcatgtatttgttgcggctagttatttttctgcgtgggaagtcgttcctgcgttgctactagcgtcacttttttcaaatctgtctggctttttgggcacaatttacttggcaaccaagcagaccattggcatcatgaaaactactgtgttagggatgattttaaatgttattttaaattttgtgctaatcccattatttggacttcagggagctggaattggtgcggcggtggggtttgcggttgtcgctttagttcggctgagagatattaaaagatttattacactcaaagtggcgtgggtacccctagttacttcattggtattattgattgcgatgacgatgatgcagttggtactggctgatacgggactgtttttatatttatctttagcagtatccgaatttatcttgattatcattaacatgcatttcttattgcgtgtcaaaagataaatagtggaaaatatgtatgtaagggggtaaagtgatggtgtcgggtcatgaagataaaactatgtttgctatgcgtattagtaaaagtgaaaaaaatgatttaagaaagttgtatgctgatatgggactagatttgtcgacggcagtaaatttgttttttaagcaaagtcttttggaaaatgggttgccatttcaacctagtagaaataataaacagaaactgagtgaatgaattgggcgaaaattccagtatgcgattaaagagtaattatgaaatatgttcactaaactggagtgaatagtagctgattttttcattttaacagttcagacaattacctcatctaattaacgatgaggtttttttataagctgaatttcatttaagtatgagtagtcccgtagtgaataaaacatgtgaagtgtttctcatttgtcgggtgataatcaaaatagacttataatggatcgcgttaattattataagtgagtcgtggtgagagtatcatttgtgctagatatatatgtatagggatttagagattatggtagctagattaaaggtgtgttaggtggaaaatttatagtatgcatgtatatttatcatggcattgacatattcctatataataattcatataaagatatctctaatgattgtgaagtctgatataattggcttattgattgtgttcaagtagtaataatgtatgatcatattggttagtggtaatcagtaaataatgtcatgatggagatgagtattgtggttagcaagtctttagtttttgtcagttatgccaaagaggatgctgagtttgcgttgcggataaaacaatgtctattgtcaacggcttcattgacaaagtatgatgtattttgctcagaggatggtactagtttaaccgccggagtagactatgtcactgaaatcaaacgagcaattaatagtgcttattgtcatctcttagtactttcaccagcattcatgaatagtccattctgtttagctgagttaggtgccatgtgggggcaaccagcaaatcatccgtatgagatttttgctcttttgacccctggtacgcgagatgatattttaaatggcacaccattggaacacatacaaactatgaaaattgaaaatgctgtgaactggtgtaatcgtatttttcactttttagagaaaaatattcctggaattcatgattttgacctggttgggaaggatgcaaacaaattattcgaggaaaagcaagatttaacaaagaatattcagatgaataatcgcttgcaagcacatattgaccatggtagtgacaagatgacggctgaggctgctaagcagaatctagaacaattattaatcagtaaggggagtacagagattagcgtagctcaatttggcatttcacatgctggaaaattatttatggagactaagtatagtagcaattaccgaaaagcgattcggatgactgaaaaagtatggcatgctaaattcacattttcacaaaacttagtcaaaaatttgagcgagcataacattactgatattacacttatggttggctattacgcgaacaatatgcatgttaactatgattatttgattatacctatttcagattttatggagattattcaggatattcgtcaacatgatttggatgcaactgaatatcagttgtgtttagaaaaggataccgacaattgtatcaccgaatatgacgggatagtgaacagtgattttaatcagtatttgaatcggtttgtgacaatctcatgatgaatgtttaaaaggaggagacgagatgtattcagtatttgtagtaatgggatatggaaaaaagactagctatcaaatgaatcgtgcagtgaatcttgatagtgtatatagttgtttgattaacccagttattaatacctattcgaatttagagagtattcgtagtgacgaaataattggaagtgattcaattgataagagtatgtatcaactattattaagtgccgatattgtgattgccgatatttcgacattaaacgccaatgcaatgtatgaattaggcgtgcgtcatgccttacgtccttacgcaacaatcgttatgaaaatgaaggacgatcatgttcccattccatttgacgttgggcatttgagattgctagaataccggctatctcaaatcaattctgaacagacgcatcaacggcttagtgaattattaaaaaatgcaattcgtaatttgaatgctaagaaaaagattacagatagtccgctctttgatgccttacctgaaattgaaaatcaaattcataaactatcatttaatcaaattatgaatttacgtactcaactctataatgatggttcaattagacagcaattggatgttattgatgaagaaatcgagaaaagtcattttgatcttgctgctcagaaatatcatcagcttggcataaatataccagatgatgctttttttattcaacaggaggctctaatgctaggtaaggacggacaatatgaagaagccagaaagacgcttcaaccgttgcatccggaaacaactactgattcagagacacttggaatatatgctggaattgagaaaaggttgtcggatgacggtcaaaatcgattgcatctgcgtaaggcattaatggcatatcggcgaggctactatattaaggaagattattataatggtgaaaactatgttaactgtctagtgatgacttatctaaatgaattgggtaagtacaaaataaatttggattgtcgaacaatgcaagaaaaagatcgcgtgacttatttacgtgtggctattgatcggaataatgaaaaagtgctcgaatttgcaaaaacggcacataaaaatagaccgaatgactattggcctcttgcaacaattgccgcttctatgttattggcgaggaatcaggaatatttagactatcaaagtttgtttttagagcaagtaccagcggaatggcaaaaggagagttttctagcaacgatagccttacgaaaacaaatgttatccgtggatgatgtgtaatcccttttgatgattgatgatttttacagggggatcgtaagaatcaaattaacaataattgaattttaacttatttttagtggcactctacacagaatgcgaaaagagaattttattgtacggtaaatagtgaataatcggaactatcatgtcaatgttttgaaaactaagtaattattaagccagtttgaacttattgagtattgcctggctaaaggggaaatttcaatgtttatcaaaaagttagcagtacataactttcgtcagttaaaagatattgagcttgatttagaggaaaaaacaagtattttagcaggaccaaataatagtggtaaaacgtctttaattctattgttagaacggatcttagaggataattcatttgatttgaaacccaacgactataatatatatgatcagacgaggtggattgtagactttacgaaaatactaagaaagttcacctcttcagatgaagacaatagggcgatattaaagaaatatttgattgactcagcaactcctgttattttgccagagattgatgttaacttacagattgattatcaaatgcaggatgatcttactaattttgctaattatttattggacttagatatgtccaaatgttcgttttatttcaaatatcgaattgaattggatcgattgaaattcattgaaacgctgatagaccagtattcaacaatccatcatgcgattgaagctctagataaagaagatgagaatgaaacatccggaaaaaataatcaagcaggaacaatgaaagcgacgtctcaagttgacatggatactgcaagtaaaacagcgactaatgtcagccaaggagtaacagattccgaaggtaagcaacataataaacctaaaaaacagcatcgctcaatgttacttgctaagattttgatgaaactatattgccaatgctgtcagtcacgtacttattactgtgatagtaaatttgaacaacttgaaaaaattcagaatcaaaatgattttcatcgcttgttcaatttcaaatatattccggcggcacgtttgactgaggaacaatctagaagtaacagaagcttaagcaatcaattagtggcttttgctaatagtgatgatgactggaatagtatgatggatggtgttactgaaacgctatataatacagtttccgagaataattcaagtgttaatcgtgagtcaacagaagtgctgagtaatgttctaaaggcagtgggtaactctaatggacagcatttaggtgatgttcagttagaggtggatgttgataagacagaaattcaaagcttagttggcagaacgacacgagcccaatacttagtggagggaactggggtatcaagtagcttaaactatgtcctaaacgagacttcgcaaggattgggatatagtaatttggtgtatcttgacactgaaattgaagcttttattagagatcgtaaatcacccgagaatcagcaaaaagttaacttgttagttgttgaagagccagagtcacatatgcatccgcaaatgcaaaatgtattcgctaaagaattaattagtagatatgatgaggatggtcttcaaggactgattaccacacattcgacggaaattgtacgtgaagtaaaagtatcaagtttacgtgtattacgagaggaaactttatttaatagtaaactttgtgatttagataaaagcattagtgatactaataagttactagacgatgtcggtttaaatgcagaaggctttttcaagtttattggaattgcagatttaatttttgcagattacgcaattttatttgaaggagatactgagcgactttacctaaagcatctaattcaaacagactcgaaattcgaaaaactgaaaaatcagtatattgcgtatgttcaggtcggcggcgcatatgcttttaaatttgaaaagattttggaaacgctacaagttaagtcgttaatattgacggacgcagattacgctaaaagcgtgaagtcagaggcggatttaaaggtagaagagacaacgaatgaaacattgaaatacttttataaggaagatagtggcaatcacaataccgaacctagtataaatgatatattcgaatggtttgggactataaaccaacttgataagttaagtacaaaggggaaagtcgtagctaatgtggagaagcataaactaaatggtgaatgtaaaaatcgcgatttagtactacttacatgtcaatccaagtcagacaagtatacgcgaacattagaagcagcgatgttaacaaggctgtttgacttggagccgtttcatgagtttacaagagaagaactaaaagataagagagagaaatacggattggcgtttcctattcccacttttaagaaaaaaggtgatgaagagaaaacagatgattcaagtgatgagagccaaaatgatgcaaaccaacgcatgattacgttgatcgacatactgaattcatcggcaatgaaaaaaactgattttatgtattcggtcatcatgaaaaagcgtgcggccaaaatggtgccgcactatattgaggagggacttaagtggctaatgttggattagcggtcgaccaaaatattcatatcatagatgcacctgccggaagtggcaagacgtataatatccgtacacagattactgattatcttttgcgtaatcctcacgaacgagtactggcgataacatatacgaaccgcgcagcagatgagattagaagcaatgttcagaataatcaagtgtatgtaagtacgattcatgcctttatcaatgatttaattggtccgttctttcgtaattcagaagtagtcaatttatacttggaaaaatatcgagataaaattcagcaaatgctgagggggaaggaaccgaaggataaaagacgaaatgaacgttatgaggagaaatacggtgaactttcctggaagacaattcaaacaaaccttcgtaagactggaattcggtatggcgaaagtagctttacggcctattattatggttatttaagccatgatgatttgctaatctttgcagcctttgttgcacataaattacctaagattaattttaaaattagtaagcaatttgggttgattattattgatgaatatcaagatacgatggaagatgtcttaagcttatttttctctgcagttaccgatactggatcggaactgtacttgtacggcgatccaatgcaacagatttatcagaaatatagtattcagatgataagacgaatggaacagttggacagacagagagttcaagcaactaattatcggtcatgtgcaacaattattgacttgttaaataagattgatgatgagccaagtcgagcacagttggtcccagatgaggtgaaaatcaaggatagcgattttaaaccacgtgctatttttttagatcagagtgctattgatagtcatgtacatgagattattgaatctgaggaggcaaataggtcagactcacaaacgttggctttatatgtattcaatagagaacggtttgaaactataggagctccaaaacttttgaaagcatacagcggtatctatggatatcttagtaagatacaaccaaaagacgtgctacttgagctagatccaggtgataatccggatgatatgatgcaaattttattaaggcttctggttggagcaacattactagaaaaagcagaatatggtcaattaattagattgaccaataagggtaatcagatttttaatgaacagttgatgttgcaaacaagtacagataaagccagagttaaagaattttggcagagtatagcgcggctaatatctgaacctcacttaacaattggcgattttcttggaagggcgtacgcaactggcgcattgaagccaatagtaaaagagacaatggaggatgagagatatgaacaactattgaaagtcgaattgaacgagcttgaaaacttacgtcataatatccaaaacttctccacgcaacatggtgtcaagggcgaaagccacgagtcagtcatatttgtggcagaagatagcgggcggtatgccccatatttaaatatgtatggctttctgaatctttggtcaaataagaaaatcaccctacattctttggaaagctttgctctgaaatatagaagcgaaatttcagtacttaatcgggagaataggaatgttcgcagtatcgagattgctgaactggaagtagatgcgaaacaaattatggacaagttcgcagatgatgagtattttaaagctttagtagaagatgattatcgtagctttattactagacctttgagaaaatcagttggcaatgtaatgaaacctgattttgttgaccgagtattgactgcatataaattgttttatgttggttgctctcgtgctagaagaaacttgaccttgattcttgataaagataaagtaagtgagtttgaaccgaaattacggaaaaaattgatagaagttggttttgatgttaaatagtagaacgaattattctactgcattaagcggttagtagactgtaagtaactgaaattgtaaacaattggctatattatcgatagctaaaaaaattgaactgaaaggcccctgatcttcttagaattgagaaagttttgggggccttatttgatatcagaaatagcgtatcaaaaactgtagacggttatttattactggtttttatgaaggcagtatagtcagcggggtattgttgggcttgcttgagtgatctggttaataggcaattatgatgattttcctatatgattcacttaactaatattaatcgttgcataacattgttcattaaacgtttgtggaatctgttataattagtttgtcaaatatgttcaagtggtaataatgtatgttgatatttattggtgtaaaagtggagtaggaagctttgtaatcaaccagttgaaattttacaatattcgttggctttatacattgaggtgagactgacatgtcagataacaaaaaatcaatgctttgtctttcaataagattacacacaaaaagcgtaaaaaaatatgaggatgttctgaaatcggaatacaagagtactggaaacaatccagtttcatccactacaatttcacgtagttttggaaatggaaaagttttttcattgactgatttgaccaaccgaccagaatgggcaggcgaaactgccattctaactaacaacaaagtggatattagcaataattcgttttcaaaagcagttgcggttttcaaagttgagtcaggaaatggcaagaaacgctttatgagtctaacatttggtaggggcgactctcttttggacagtgttagatatataaatgattttggtcgcaacgtggctgccaagaagatttctggatttaaagttactgcaactgatagttttcagataacagatagaatcattcaaagtgcaaagcaatatgtcagtatgcaaaatgtgggaatagaggcgttgatcaattcacaatctgagtttgctagtagtatttctggtaattttactaatggtgagattgaaacccggttgcatggacatgatgaattacttaaggctactagatttatgggatgggatgaggtaaagaatgatttacaatattatcttaatgtctatctaagcagagcaacaatggcagggtgggcaacacgggtcacgaagattaatggcggattaaaacaaaagttagatagtgctctcaccaaaggaatgatttctgggcgtgtagaatatgctattgcatggtctacttttcgagaggtgaatctgttaactactactctattgaaaaggattccggatatatcacccacagaacaactttcttggtatatcaagtatagacaaactaaggatccaaactataattctgatcaattgagttcaaaaataaaacagactaaattagttgctacagttgagggggatcagccagagaacattcctttatatcggggaatactggcggatctagtattcgaaaagcagcgatacctactgtacaacgggaaatggtatcaagttgaacagcagttttatgatgaaatagttcaaaaaataaccaatattcctgtttgtaatattgaacttccagaattgaaagttatatcggataaggcaggtacgcctcattatgaagatgaaggttcatataatattagacttgctaatagcgtgattggtggtactttatttgataaggtgaattttaatgcgcatctgggaagtgattttcgtgggccggaagaaccagcagatgtaataacaacctcacgtaatttattctttgtaaagaagggaaattcttcggcagcgctcagccacttattcctacaaggattagtttcagcaaaacttctagcacagggggggactggtgagcttcgaagatttgttaatgaaaagttaaatgcggatgtgtttactgataacattcgtaatactgatgtgacgttaaccttcgtcgttattaagaaaacacctaatttacccttcttttcaatgattagtttttctgaagtattagatggcctatacgaaatggggtataaagttgaaattgcatggcctaagattgaagaactctcgtaaattggttgagagttgtgtttggtcggggtagcggctaatttattgtcttgaattagctggttaccaagaaattaaaacagatctttttatggagagtagatattttagcataaaagatgagaattgattatcatatgtcttagaatgagccataatgggtcaaccttgctgaataagaataattggtcatatctatcagttgtgtaaacattatttaatgttggctagctgctcctgtactaggcaagttctaaccttgattattaataaaattgaagtcgttggtcttgagcctagattgtagaacaatttttggtaaaagaatattactgaataatttgtaaatcaaatactaacacacaagtaatacttgaacataacatcatagattgcaaccataatagatagtttccgaacttaacatgacggggatatttaaggtaagatgctcatgacctggactatactaacaaataaagtggagtcaaagaaacaggtgatcggcatggatcaaaagcaacgcaaactttataacgcatttgtaaccgaactaaagtatcgagatttaaatggcaagacaattcgagcatatgcgaatgacattagacagtatatgaagctgtataattttaaggatagtttatcctcccggtcgtttcaggaatatgttggtaaaatggttgcttccgacttgaaatctagtacagttcaacggcggataatttcgctaaaaatatttgtcgactttttgataagtcaacaacaaattgccgcttttaattttaaaacggttaaatttcatcgaagtcggcggttgccacgggtgttgtcacactttgagatagtaagactgttgcagtgcctatatgatgaacaaaaggtagtcacgacaccattcgccattcgtgaagcggtacgaaatacggcaataattgaactgctggtttgtacaggtctgcgaattggtgaattgagcttgatgaatgtggatgacattaaccagcattcttggacatttattgtacaaggtaagggaagcaaggaaagaattttatatgtatcgagcctagaaacacggcaagcgattcagcaatatttgcggatacgaacacagttctcaccgcaagacgaggccttgtttgttaataagtttggcagtcgactatcaatttggtcaattgagaatgtgttttataaatatcgtgatcatagtcatatttcaagtcaagcgacggctcattatttacggcattcatttgcgacggaattgttgaataatggtgcagatttacgagttgtacaggaattacttggacatgccagcattacgactactcaaatttacactgaaatcgcgactgtggacaaagtgaaggccttacgtcagtataatatgcgtaatacaatcaatgttacgggccagcattaataggaatcaaaaaatacagaccaccaattacaacggtatttaaacgtagtgattggtggtctgtatttattatttttgtaatagttatgtcttcttcaaataactactaattatttgaaggtgtgttaacttgtactacaaaatgacaaaaaatgatttcaatgaacttattaagaatgcgcacagacgctttcaaaaagatcatcgtttagttgttgttgcaaatgtggttggtcaaactaagaaacgtgacagccagcaaccagacagtgatttttttagtccgcaagaaatcactgaaattgataaagcattgcagatagctcaaatacctcatgaagttttaacttctgagttggatttcaatcagaagattcttgataataaaattactgcaaaatgtgatattgtctggaatctaactaggcaaggtggttctggtaataaaaagtcactggtgactagtctggctgacttcaatcaaattccgtacatcggctccagtgtcgaggaaatggctgtgtgtcgagataaaaatagtttcgaacaactgattaaaccggttaatgccagtatcccaacatatacagagactgagttcgccagcttttcaggtaagaagcaaattattctgaagaatgctagtggatccgcaagtattgggctgagtgatgacagcattcaaagtatgtctgcggtagaagtaaatcgccagattaagagagccaaaggagacaagatagctgagcaatttattcaaggctttgaggtcgaggtgccagtatttaaaaccggttcaggaaaagaccgacatttcaaagctttatcaccggttggaatcagttttgacaatcaacgacttttgaaacagaaggtgcttagtgaaacactctcggatacttacaactaccagttttattcattgtttgatgaactattcacacaagaacgtgtcgatactggattagttgaaagccgtctaattaatcaggcttgtcgtattgcagaacgattgagcttgtcgaattatgcccgtattgattttcgagtaaccctcgatggaaatggttattgcttcgacattgcgtcaacaccatacattatcaaacattcttctccagtttggggggcagcccagttagaattcactcaagctgaactaattaccgcgatactagggacggctgactagtcccagtgctgaaggtcactgtaaagcgaaagttgatgactaagtaaagatctgtgccatataggattctgtgcttgctttaagtaggccttttttagtgacatataattatcaacttgattgccctctaataactgttccagatagtcaagccgccgatacaacatatctcctgattctaaatcggcaaacaagttcggaatcttaaggacaagcaattgttcttttagactggttttcgagatactacctttttgatatctgagcatcaaacgattatagccaacatagaattgataaaaatcatcctggggtgcgctacttaaagcaatggtcagcatcgtaagtgcggcattgatatttgcctcagcggcttcaaccgcaagcattgccaggttaatatgaataattttatgactagttgttgggattggacttgtcgcgacttggcttagcgacttgccattataacattgcttaaggaggcaatcttgtgccacattggcagttatgttaccgaggagatatttccccaacacataattgtttaaggctttatagtcataaatgtttttctcagcatccaagacagtttttagttcatcaagatactgtaattgatcagatttacttttcttgatggcactgcacatatcaataccaactaagttagttagtgttctgagattttcgtgtacatccgtcgcgtcaagtagcgttttgataccttcaagctgtatccgttgtgtttcgctgttgttgaaaactccctcgtgttggacgagggaaatcaagagcattttctgaatttctttaggccatttgatttcaggattatcgagtaatgaatgcattgatgaaaacatcttgttggccgctagcttatatttatccagattataattaagaatatctggtgcaagctccaagcccaaattgaacatcatatcgtattcctttaattttactagttcatcgtatgctgagattgccttcacaattgcgactgtcagtaaggattcaactcgtattctcttagcaaattgaattaggataatatacaattgggccttcaacagcggcgacttagtataagttaaaagctggaaggcggattggcgaagactactagaaacagatttttgcgtatcaaccgttgctgcccgcatctgtagtgcaatattaagaatgtggtcgctcccttcgttgactttatattcacccgtttgcagtttgtcaatcgttctaaaaacattgtcatgattggcatgaatatcactatgttcttccttatctgctatcgctgcccttaaagcatagttccatggcactctttctttaacgatatcatctaagcgacaaacatcgcgcttagttgcattaattggatgtccttgtaggtagtatttcaatatggcgcttagtttgtaatttggtttagttgaagtgtctattaatcgagctttcgttagcgctaatagaacttttttggccttcttggtgccaatcaatttcattaaatcgttcttggtaacaccgtcatctaaaacagacagccacagtttagcccgatttgttttattatcctgagatttagtggcgatttcaattggctgaaataacttttgtaaattgaaggaatcattacgccttatcaaattgaatagtaagccgggacgtgatcctaactggttaatcagttctgctgatgtcacaggaatcagtgaggcggcatgttcaatttgggcatcaatcttcttgcttgggtcagttgtacattgtatagatgagatatttttttctgttattgttggggtgtaacatagccgccaatgagaatcttcttccaaccttttttcaagcaaagtcggcaagttagttaaaaccaatagataacgactattttcggtattgttcgcaatatgctcaattagccatttggtcaatgacatattttgatactcattctcaataataattaaacgactttgttttttagaatttagccctggaaatatatctgcaagagatggcaagctgataataccgttaagcaaagaaatcgagctgttgaagacaagtttttctaagatggtagtgataccttgctcaattacgtgtgaatgacttttattaccccagacggaagacttaacttcccccgacttagtaatctggtaatctaaaacatcaaaatctggcgctaattgtccgccagctgtaaacatcggtctaatcgtttgctcaagaaaatagtgctttccagcaccgtccggacctgttaggacgcagcgattaggaatacccttcgagttgttattgcgtaatgcctctaggccgagctgggatgataacgtgtccaattcaggatactgataaaaatattccatgcgacacctccaacaaattagtagttatttccataagaattatatcatagttaataatgataattatcaaataaatcgagttgtcaaatgtctaaaataaaaaatattatattcgaatgagttgaataactatagatgtcaatacatattggctttagtataaaaaaatttattattttttagcaaaatacatgttaaactgccgtaagcaattaatcgattcgttttactataaaaatgatagttagataaaaagggttaaacatgtatacggaaaacacggggaaacatcatcgtaatggtctgccagtttggttgttgccattactggtcgtcatttctttctggggtgtgtcacaaaatatcatggtggttgatgcttcatcagcggtcacggtcttaccaggcaatggggcacgctcccactggtaaaaaggtcgtggtaaggcgtaagaagaaatcttcgaaaaagcgtatctccaaaggtagtgatgtaattgccacgtttagtcgtaagaccggtatcagtaaaggcatcatttcgcttttgacgtatctagttgggtataatgatatttataccatgattacgggaaaagatgccgctaccggtaagaagcgctcgcgtttggtaggagcagcttggacagccttgaactttgtgcctgtctcgaaagtcgctaagttcaaaggccgcgaaggttatggcaactgctaagaaggccgaaaaactagctaaacgaaggcccgccagaaagactgcgaaaaaggcagctgcgtaaagctaaaaagggcaagcatgcaaaaaatgttcgagcaacaggtcaagcaaagcatgaggcaacccatagcgctggcacacggttatccgaagcaaaagctaagctttagcgagagaaagccgccaagcacgtaaagcctcaaaagttttcccaagttacgaagcataaaacaactaagcagcagaagcgatacaacaagaaagaagctacgggtaaaatgagcaaagcttcgtatgcacggaaaaattcggataagcgtaaaagtggtaagtccaaagccaaattggggtttaagtataatatttccaaaggaagccctagtcaacttcctgaccatgtaaaaaagtatatgataagtatgaagcaattggttggaaggggaatttcaaggggtaaactgaggatataaaagcaaaagaaaaatttaaaaataagggtaagaagcttcctaagtatttatgcccaaggtgattcgttggaatattggaaatttgatattaataacaagataccaaataacatctgagatgcagaacgtttttggataggtagcaaagggcatgtatattacacgaataatcactatgcttcttttgtgaaagttaaatggggtaataacaatgaaaaaaaatacgatttcttatgttgataaaaacaaacttttatctttgaaaaaagatttgaaggctttgaactattttgttgttgaagttcctggtaataaaattcacaccgctcgacaatatttgaattttatgggaaaagagtttaaaatgccggattatgcaggctttgacgcttattcagattggatgactgatttgagttggattcctaaccataggattggtgtaatcatagatgattacgagtcttttttgaataaggatctcagggcaaaagaaatagtaactgaaagttttacggatgttattttacccttttgggaaaaggatgttatcaggattatggttggcggtaagccaagaatttttgaagtttatattgtaaaataatactttatttgagcttcagtttagataaaaatcttaatttcggatagttaggttgaacaaacgtctgaagattgaaatgtgagtctatcatcggtatgaagtcatcttaagaaaaaacatcaatattagtagggtgtatcgttgttaattattgcaactattcgcgtattagtaatggtcattacgttgacttaagaatctggagttatttactgggaaaaggaatcaatctaattttgttgccactatcattccaatagcttactttgtcgttcgggcaattttagctgtgatgacacaaactacgacacatggactaatattgtcattagtcggtagtgttataccagttggttactttatcgtctgattagtctttgtactgggtcaaggcgttcagaaactgataattagtttagtttataatttggtgattatcgttatttatgtcctgctgtttgtttgggcacgacaacgattcaataagcagaagcaaacgaaataattcggttgaagatccagaacgttgatgaaattgcgcgttctggactttttagactgttaccggtattaataaagggtactatttcatttctaacggatctagttgggtataatgatatttaaccataattacagggaaagatgccgctaccggttacaacttggtcacaggaacacgatgagactttgcatagagtcgtgcggcgtaaatctaattttaaacgtatggatatccatggtaatgattggtgtgcggagactactaaaacatataagcaaatttggattagagtccgcgatggtaaaataactgatggtggtattaatagtcgaccagttcctgttatgaaagatggaatgcataaagtttcttggtatatcaagaatggagtgaagttaccttgacaaaaagattgagtgaacaggaaagttacttttcaatgtctgagtttttggattcttattattgggcaagcaaagatgatagcctcggaagtttattggggagcgtcacgttatggagtgatgatggggaattgtttgatcaggcaattgcggaggactggcatactttctttggcgacgtgagcaacgaaaatcacactgtgtttgagagtttgcaagctgtcaagcagtttgtgaatgagtatttgccgggtatcgcagcaacgacaccagtatcaggaagcttgacgtataacattagaataatttgtgagatgacagaatctcaacgaaagcaggaacccgtgtggcaaaattggggcgcagctgttaattggattacgaatcctaatgttgtgccagtcaatgaatcgccctttcttaaaacggggcaatcattgcctaatccaaaggaaaagggttttcggcaaaatcaatttccaattgccaaggttttgccagcgccacgaccagaaattccgatggggcccagtctggaaaaggtggacttgacacagtcgtattatgcgtttgtgaaatttttacagcattattatcaggttagtgatgatagtgaattgggtaattttttgcagcaaaatagagctattagtgaaaataatgaagaataccgctattggaaagaggggttttcggagagttcaggtaataaaacattacttgatattttaaaagtgtttttaatgataaaggattattttgaaattgaatttccggacaatgcactgcatacgcatcctgtacgtaaattgagttgtaatctctggaaggcagcgtatctgccacacagccaacgtattcagactgaggtttggcagaattggttaacggcagttcaccaagtaatggagtaagtgacaatgtcattaaaaaacaaccattttggcggataaattagtgctggttattgtggttattggattattgttgatgggtactttagacttgaagtgctggaactttttgttaggaaaaaagaattaatccaattttgttggcattatcattcatcccaacagcttgcttctttagctgtgatgacgcatgaactagtatcgttatggtcggtagcttgtcattcaatttattttactatggtttatttatttgaggtaagtgacgggctaataaatataggaattagccagataaaataaatgatattcaacgagaaatagctacagtccttctaaggttgtcagatgaaataatataattaatttgtcaattttaaggggacttttatttatgctagttgagaaaatttaaaataacctttccatgtctattgaaggacttgttgaagggggatatattgagttaataacaaaataagagttaatgtttaaaatatcaacggaagttatatattagaaagaattcccagactgaaaaatatcaatgttattaagcgtaaaattttgtaacaaataatcatagaagtgtgtgaagatggtttttatatttattcggatggtcagaggtattattttgtgtatagtgagcgaggaactgaaaataagtataatgtaacagataatctttttgaaataatgtattgggctactagttctatgacagacttgttggcaatcaggtagatttatgaagtattaatcaagattgcaaactaggaattgttttttagttctccaagaaaggcggactaactaccggtctaaaatatacccaatatataccttaaaataaagaggaaaatatgaaaatagaagagtttgaaaataatgtttctaaagaagaaatagaaatagactactatgtgccagtgtcaattagttttccggaaaacgatttggaagaagaagggctttattactatagattcattaataaggaatattcttttattgaatttaaaattaattcagttagtaagaaaattgtgaatgtaactgttacttctatcaatgatattcaaaacggtgattttatttttaatggaagcatatccaaagctaaccctattattgacatatatgagttcgaatatgaggctgtcattactaacaatagtagttttgaattttatatgggggagaaaaaaatattctttatacttgataatgaagaaatttcttccatgattatgatttcaaatcacttttttgctcttttaaatagtgagaatgatatagttggggcgcaaatagccaattttaatgatgaggactggaacactttggttggaaatttaaaagaggcggggaaactttgaatcattaacgttaaggaaaatgatcatactagactgaaacatatgttaaaaagaatcatgaagccaattttgttgatagaggtgcggacaaagaaaatattcctaagttgttagataaaactttaagatcaaagacaataaaatgggcgttagtaaaaaaatctatatgtggactatcgcattaatggaaaagtatatcgagttacatatggggacaacggcttcgtcgtatcgttttatccaatgtaagaataagtaatacgaggagtgagtatgatgtataagttgttatcaatagatgctgctgctgtcacgaggaatttgatgcttcagaataccgagacgaatacggttgaaaaggtttttgatgactcagacctaataaatgaaggtgagacttttgagtttatggagattggtaaaacatatgactgtaagttggctttgtttggtagtatgaagcaaaggcatgttggtaaatggagaaaatttaatattcttaaggctaatgtgaaaataggtgttagattgttcttggaagtcgaggcagagcaggatatttattatattagtcagaagaacgtaccaggttatgagtcgatgaagagttttatgtttgagtattcgcggttagatttgatacaagtcaacagtcttaacagtggaaacctgtatcttgactattaaagcggtatttactagttttataaaatatagtgtgtcatacacatattcagaagaggggtacggtgttcattattttaataattggtttattgctattagtggctacgctaggttcgggacactggaacttttcgttaggaaaaaggaatcaatctaattttgttggcaccattattccagtagcttattttgtcgttcgagcaatcttagctgtgatgacataaactacaacacatgacctagtattgtcattagttggtagcttgttattcagtttgatttactatggcgtatttgctgggggaagcactgcgtcaataagtaatatgaattagtcagattaagataaccgatattcgacaaggattaattgccgagtatcggttatttttatagaaaagtttagacaagttgagttatgagggaagaaacaacacatattggtattaacttttgctggattgatcacggcggcaatcacacttgtcaggtgtggatcgaccattcttgaaagatcttgtgctttgtgccgttttagtttaaaaattcagttataactcctaaacgcaagtgtacccagcaattatggttgccataaaactggacagccttaatttggtatataattagaaggagggaagtttatgagtatttcagatgaagtccgaagaaatcttaaaaaacgaagacgtataaatcaagatgatgattttggactgaaacgaagctgggaagaattaacaaatattttatcaaagaatgaggatgaagcaattaagtacttgatgaattgctctgaagatgatgtattattgattagttctgtttttgactatgtttctgagaatttacaaagtaagaagtttatatcttgtttgagaaaattagataaaaagtatcctgatttgaaattaacatcctttattgatgatgcggaagattatattgaagataattaaaaattaattgaaagagggaaactattcaaattgtttggatggtagtcccattggcgcttcttgttggaaaaatacgcaaattgtcttggccatgacgatgcattgtatgacgtatggatcagtatcagtatcagtatcagtatcggtattagttagtagcttgctatttaatctaatttactatggtctatttgtctcggaaaaaacgtaggattcttaatccattttgattaagagaatcaaaaaatgatgcttgtcatgaattgccaaatatcagtttctcgataaagctggtgttgttactatcattcctaaataggagaggttcaaaattgtttacaaaatataataatttggatttgctagagttattttggtcagaggctgaaagtttaacgggagaaatgggtgacggagaagttttatatagaagagcaatcggcgattttaaattaacgttgttcatatattcgtatgaaatgaaatgtaatgtttttttgagttataaagacgaaaatatattatccattgagctagacaatatttctgaattgagaaaaaatgaagaccaattatactttattagtagcgaaagtgtcgaattatgtgtgacttttggcaaagttttttcggtgaagtttgaagataaatagatttatagcatttaatatatgcaatgtttttactaaaattgttttccaaaaaatcttttattcttatataggcgatgggtattaaaatctatataatacggtagtcagagttttttaataaaatatatggctgaagttagtgctgtaattgccgcgcattgtcgtaattgaagttggtaagccaaatggaatcccttattttaaaaaattgaatatgcgcaaaaaacatttgtagatgctgattttttagatattgtaaaggaatttgagagtggtgaagaatgaacgaaagtttaaaaggaaagcgattgtagccattcgaaggttgtttgctagtttaatgattacttttattcatgtcatgttgtttggaaatattgattcagtaataaatagtccgtttggatttcagaacatcagtaaaagtaatgcgctcggaatttttctaatcaaagcgtaaaacagtgccgaaaaatacgctattaccagtaagaaaagtttgcgtttggaaggtacggtttgaatagtctgaactttgaatcagcaatttaagattgcagaggcttataaaaaaagctaaatatatgaaaaatcggtcaagtgaagctattgtactaggtcacagctggctaagtattaatatgcaaagatatgaaacctactgatggtgcaaggtatgggaaaggttatttttaattacccatggggattgtaatggataattagtaaaaagtgcaaaaaaatttgagattaataactggaggttaaatcaaagtaggaatggaaactgattatcaaaagtagtgacgagcagatatactgtccgaatgacttccatgctgcttttattaaagtgaagcgaggtaataatcgtggaaaataatgtgatttcatatattaatagtattgacattaaaaaactcagaaatcggatgaaaacgttgaattattatatagtagaagttccaggagcaaaaattcaaacaaagcgaagtttccttgactttatgggcgaaaagttctccatgcctgactatcaagggtgggatgcttacgcagattggatgaaagatctaagttggatacctaatcgacgaatttgcgtgattattgatgattatagttcctttttaagaaaagattctaaagcgagaaaggactcgattgaactttttaaagatgatattttgccgttttgggagaaggatgttttgaagtttgtagtgggaggcaaaactagagtctttaaagtttatcttgttaactaagactacaaaataaataagcatgttgtatagtttgcatagcaattttctgatttaataaatataccgattaattagatgctatgcgaagacaaactagtgtatgctttcgccataattaggctaagtatgatacataggccagcattattcagtaggttgttgtcagttataataactgatctgttttagaaaagtatcaatttaataagtaatatcaatcagtaagttagtgtaactagtgttcccggcgacgtgatttaaattgctcagatctagttaaatgatatttataattactttaaagtaaagacagaaaattgtaaatttgacaattacttatacgataatattcgaaatattgcttttttaatggaattacgtttgaagaggcagttccattaattcgtcaaaaaatgcaggatagtttactattagtgaaatataagtggaaaaattttacaatttgagccggttatcaagatatctgtcaaagaactaggtgaaagaattgtgaatccgggaaaattgttggagatttgaacctagtttaggtgaatgatcaacaacttggatgaaagtcatcgccaataaagtgggcgatatcattacggcatatcttgtttcaaataatgggaggaaaaatgaatcaaaaaattctaactgtttatgagaattttcaaaatgtaagtttgagtattttttttgatgagctgatactttttataaatagatatcactatgaatttacgaagtatgtatctaaagattatttagaagcaatggaaaaatttgaagcaaagtattttattttgggacattctgataataactttgaaattggtatctcatattatagaaatctgatagagcaagggttggataaagaaaatatctgtagacaagtttcgttgctaatatgggatttaagtggttatatgatagacgaaatttgtccaatttgtcacgatagtaatttaatattagcatcatcaattggtagagagaagcttattaagttttgtgatgagtgtttgtctactgaaatagatggaaaatttgttcagactgatgaagaaatacttccagcaaatagagatcaagttaattcatatttaaggaaacaagctctctaatttaaaactatcataaagataaccatgaagcagacgagaaattaacctactgaattgccaaagcaagtgcaaccttataaaaatgtggttgatgttgaagtatcaccatgaattgctgaaaaattcgggtagtttaatcatatggaagattgttaggacagcaataaaggaacgactgaagaattgaataaacgtcagccaggaaagttgaaaaaggaattcctagaagaatagtgcaaaggattataaacaaatggagattgcatagtgagcagttatagccaagcaaaaattttaatacatgaaaacaaagatttagtagatcattttggtggggcttcaagtgaattaatagcaatgggagaaacaaaactaggtgtacagtttccgtctgattataggaagttcttattggaatatggcgccttaacattcggtgcagctgaaatctatggtgtttttactgaggattttgaaaattcaggagttcccgatgcagtttgggcaactttggatgaacgtagggtggtaaagatgcccacaaacttagtgatgatttataatacagagatgggtgaaattctttgtttaaattatagagaattaaatacaaatcaagagcctaaaattacttcctattttccaggatttgctgaaagcgttcaaaaaaatgaagtcttatataatagttttgatgattttttgctagatatagtagaaggagaattagagtaaaaaacaaactgagataaaggtccggatatatgttaatctggatggtcagttatagccatgatggtggaaaatatgacacaggaactagtgttgttattggtcagtagccttgctggttagtctaatttactatggctgattaatttagattaagcatcatgcgaataggcaatatcaattaatcagataaaccaaccgatattcgacgaaaaccatttgccggatatcggttggtttttagaatattgatgaacctagcatattctaaatattaggacgattacaggtagtgatatagtaattaatgtagtgactaaattaggtgtagaggtgggcccaatgatgttgctatcaggaagaatactgaatgatcccgaacatgttataaatttgctaagttaacaaaggtgcgaatgttttggcatttggcaactgttaagaaagttatgaggaaggtcactatatgacgatgaaccgtgcggctaggaatttagttaaacgcaagtcatcgaagatttattattggaggccaaacaactttgagatctaactaaacacatgacaagtaaaggaatttattatgaatttaataacgttaaaagatttgagagcaaaaaggttaacctataattgggaaacaatttatgttggcatggaaatggcgtattttaacattcaaactatttcagattatgctgttgaactaatggaaggcggaattaatgatgaatttatcaatcaactggcatggggagttgaagatgaggactcatcacgaatattgtttgaaataaagtgtcattttaacttagtatctgaaaaaacaatgatgagtataaactagagaatagaaaacttaggtttgtctatctgtccaagctcaatgatgaagtaactgatgacaagaaattattggatgaaattgaaaaattttatgacaaccagggctatcctgaagatatgaatacttttattgaatatatgcctcaagattcatacacaaattgtaagatcttaattctaaggttccatgagtttttaaatttagagggtgaacaattacgattgatttaagtgattaagcagtatgatcaatcgatttgcctactgaagtatagagtcgacgttaattatttatctcgattatcctgagggaagagaattgatggatgtattcgacgactggattgcatagaaaattaaaaaagtgttgcacttgatttgacaattaagagagagaaattaattaattttttcaacataacgaaatcatacctatattaaatctaaccataatacgtttattatactttgaagggaagctatcaatgtcaattagttcattgagtactatttgtgttatattgttcatttctttcagtatttattatagtatttggaatttgacagaccccgttttaagttacatattagtctataatttttaataaataagtaccaagggatgaggtatcttgatgcaatggcaaacgctttttcaacagcaagtgctaacgcgtgcgttcaattattatcaagaaggccatgtcaaaaaattcagtaaggaacatcataaactgatggcgatagtgcagggtgttcaggactatcaggttacgatttttgaaagtattggtgacgttactacgatgatttgtaattgtccgtatgctctttctggtctgcactgtaagcatatggctgcagtgttgtattatgttgaaaatactgtgagtgttggtagtcagttaaagatgaattcacctaagaattgtcagggaaagttattcaagaaatcggatgatagagttggcaacgaatggaactcggatctcatacaagatattcgaagttttaccttgagccagagtaagttgttagctcatgaagatatgctagcagttaatccatgtccattatttacaccacttgcggatttaccaatgttattcaagtcttgtgaatggttggtatcaaccgaactaccgagaatgcttgctgctaatcagcaacaaatggtctttgatatattgacttatgcgtacttgaagttatgttacaccggcgttgatcaaactaatctgattgatgagtgtgcccgtctattcaggaagttactaacacatgccaacggtcatattcgccaatcgatctttcggtggctatttatatatagtctggcattgccaattaagtatagctcacagtttgagctgttattgttttatagtgatgctttcagtaatccatggtttcttaatcaaaagttgatattggttgaccacaaaatcagcaagcttcaagccagtcatcatgaaatgcaatttcaagtcgaaactaccgtaattgaatggcaacgttatcgtatccatgttatgaaagagctgaaattatcgccaaatactgtccaagaattctgccagttgaatcgtgatgatttagttgttagtgattattttgttgagaattgtcgtgagcacaacgatatagaacgtgccatcatgtattgtcgtactgggattcagcaagcggcgcaggatgacaattcgactgtcatgtatcattgctatgaccagttagtttcactctatcgagattgtggtttggtgaacgaataccggcacgcgttgtttgaagcaatcaccaaatgtgatgctttgaattctaactggtacattcagcttcgagagcagtattcctcagcagattggtcgaatgtgcgtcgtcagattagtgctagcataattccgcaaactgattttgaatgggacagttttcaaaatgtgtctgtaaggccgtatgtactggctttgcagcgagatgtgaaggaagcaacaacacctgagagtcagctttcaatcattaagcaactagactatctacaaaagtatcatggttcgaccgggttagaggtagcagattggctttggcaggattggtatcgacattatcctgaacgtaaagtgttgattgatgcgtttgacgaatggattgcacagataattgaaaagtattaaggaagatctgcattgaaattttgtaacaatgaaccgttctataagtatgccctgttataaataactgaaactaaataagctccgatttattcatagaattgattttaatcgaaaattgcaaaaacgagatccagctaaatgttttcactcgactgggcctcgttttttaagatggattaaacaaacgtaggtccagcaactagaattcaccaataatactcataaaattaagggattaataatcacgtattctattgataattcataaaattattttaagacttttgttatgttcttttctcgagctagaccttaaggtgtgttggtggaatattcaaattataaaactgaaatttagttttacccgttcggatattgataatggtttgacctcgaacggcaaatttttctgaatcgttttataatattccatattaattaagttcaatataataattaatatagaatattaatttacataacttaaaaatttaggtacttgtcttgtcgttagtcttctagctataatgcacattaaagtagcgtgaattatatgctgtgagttgggtagctaatattaaactaatgttttgattttagtttgataatagcagttttgatatcacttgggggaagctaatggcaaaaattgcatgtgtgattgtcacttacaatcggaagcaattgttagaagaagcattgaacagcgtgtcgatacaagcagaagcaccagagtatgtttttgttattgataatgcatcgaccgatgggactgagaaatatattaacgataaattcaattttgataatcgacattggcactatgtacggtgctctcaaaatttgggtggatcggctgggtttgctcaaggtatgcggctcgccctgcagacggattgtagttggatctcaatctctgatgatgatgccttgtttgagccgggatactttgcagcattacgagaagggataaagcagtatcctgaacaaagcgttttttcaggttccgtgttattgcctgatgggaaacatgacatgatgcatcgggaagtcatcacaaattcagcaacactaactgtgaagccggttaccgaagaaacttacaaacatgattttagctatgatattttctcttttgtggggattttactgagtcgacaggtcatcgaagcgattggtttgccagagcaagactattttatccgatttgatgattttgaatatgcggtgcgcgcattaaaatttggtcgtttcatgaatttaagtgcagctaaagttttgcacaaaacgacttatactcgatctgctattgcaccttggaaagagtattatgttatgcgtaatcggattgcgctattaataaaacatcgtggcaacaatcacactgttcgctggtattgtcgtcgctttttattgcgtaaattgcttgcaattttgctattcagcaatcgacgtagacaagctcgttcgttagttaatgcttatgtcaaaggttatcaggatggatggcatgcacgcttaggtcgtcaattggcatttttgccctcctgagttctgttaatatttaaataaaaatgatacaagttttatcaattttttacctcagtatcataatatttgggagtggacaaacatgcaatatggggcgattgtggtaactttcaaccgcaaacaattactaatcgaatcaattacggcactactgaatcagacggtcccacccgcgaaaattattattattgataatcattcgacggatggtacaaaagctgaattacaaacagctgatattttggctaatccaagtgttgattaccggtatttgaccaaaaatatcggtggtgctgggggctttgctcgggggatgcagattgtggcggcggatccgaacttggattgggtttcaatgtccgatgatgatgcaatttttgagccagactattttgaaaaactaattgcttatcagcaagatcatccaaatcgccaaatcttgacggggagtgtgtatattgaggatggccgtttgcaagcggatcagcggaaccggttcaccaattggagtacctttcaagcgcaggcggtccctgaacgtgaatatcgcggtaattttgagtttgaccagtacactttctgcggtgttttcatgagtgtggctgtgatcaagcaagtgggagtggcggacgctggctactttatctggtgggatgactgtgagtacgcggtacggacggccaagctgagtcgaccggtcaatgtgagtgcggctaaattaattcacaagacggctttaccgtccctggacttcaagtctaaattcgtacccgattggcgactctattacgggcagcgcaatcgcttgattacgattaagcggtggcgtgcaaactcattggtcagtctcggatggttgcttggattctacgcccgattggccattcaactctgtggaccgttttatcgtggctatcgcaaaatggttatcagagtttacttggaggcgttacgtgatgcgagtcgcgagcgtgagggcttgaatcccaacttcatgccgggacagaagttttagtgtgggcctgatcgtgagctgtctgatgacatgggaactgtatacgggcgaaaccagtgattattgcaatttaaggtcagattactaaaccaggccgactcaattttggacatcagcttcatcattattaacaacgaattaaaagctagttgtgctgagaaaaaacttcttggcacaactagttttgtgttttggtgacattttagacggaaaagcaaaatttaatttttagatttattttgtaattcgaatggataattttactgtttttacagcaacgtttattggtcttttgaccagtgaccaccagaaagcattcagatgattgcttgtatttagtcgcaatggttgaaaccggtaatcataatattatttgttatttagatagtaaacttaatttagcaagccccaatatttgattaaaacccattatatccgtatgttgagcgattgtttatcacgtaatgtttgttataattcaccaagaacaagttaattttgggggaattcacatgaacgaacaatacgattatttggtagttggtgcgggactatttggtgccgtctttgctcatgaagcagccttacgtggtaaacgggtcaaagtgattgaaaagcgcgaccacattgctggtaatatctacactaaggaagtggcggggattcaagtccaccaatacggggctcatatcttccacacttcggatcgtgaaatttgggattacgttaatcaatttgcggaatttaaccgttatacgaatagcccagtcgctaattacaagggtcacatgtacaacttgccgttcaacatgaatacgttcagtgaactctggggcgttcggacaccggcagaagcagccgctaagattgcggaacaacgcgcggcggcgaatctcggtgatcaccaaccacgcaacttggaggaacaagcaattgcgttgattgggaccgatatttacgaaaagctgatcaagggttatacggaaaagcagtggggacaaaaggctacggatttaccagcgttcattattcggcggttaccggtacgctacacttacgataacaattactttaacgatacttatcaaggtattcccatcggtggttatacgcagattgttgagaagatgttagctcatcctgaaattaccgtggaaacgaacaccgacttctttgcgcataaggctgagtatcttgcccaatacccgaaagtcgtctttaccgggatgattgaccaattctttgactatcagttaggggaattagcctaccgttcactacgttttgagactgaaaccgtgcccgtggataattatcaaggtaatgccgtagtcaattacactgatgctgagacgccgtatacccgtgttatcgaacacaaacactttgagttcggtaagggcgatgcggatcaaactgtaattacacgtgaatttccagcgaactggcagcggggtgacgagccgtattatccggtcaataatcaaaccaacaatacgctctacaaacagtatgcgaagctcgccgcggctgaaccccaagtcatctttggtggtcgactaggccagtatcgctactatgacatgcaccaagtgattcacgcggccttagtgacagtcgcgtcggaatttgcaacgaccaaataaaagaatgtgtgatgattgaagatgagaaaacggctagcaattgtgtgggggagcctagcattgctcgcactattattgggatatgcttgctacgccctgagtattcagcgcggtcaagacacggtcacgcggatttatcaaactgatcaaaatgggacgccgattatttcacccggaccaattaccttagtaggtaaggtcaatcaccgcaatttatttcaatctggcattaatggctatgtcttaacgaatcgcgatccattgtcgactttgttgccgcgtcgtaatcaaacagtgcatctaaagtatcgttctgcacagacgacggcggagctacgcaagacgctacgtcaagcacggtatttacaggccggtactcagaataccaccacgccggtctttcaaaatcgacagcagcgaggtgatgcgacaacgtacggtcgtatcagtaccagccaagacggccggatatggacgaaactacccattagttatccgcatgtgcaattgtcacggccgagtgtctggtacgcgaatggccgcttgacgttgatagatgggcaagaccgttactggacgactaattttaaagattggcaacatcaacggttgaactttaacggggctgattttaagcaaggtcgggttcaggccgtctttccaggtacgactcgttcagcggttgttatggttcgcggcattgatcgccaaagcagtcgcgccaaactctattatggacagctcacgaagactggacgggtcaaagcttggcacgcgttacaactaggaaagctcccagcgcgccaaattgctggaatgagcttgattgatcaacacttatacttgtttcgtcagcgcggtacgcagttggccgtttatcgtgccaatcggttgacgcgtccggtcaggttggttggtcgcgttaagctaaatcatgcgcagtcacaacgagtgaccgcggtgaatttgataccgaccaccaagcatcgctaccggttaatatttgacttgacgacagctgaaaaggttcagaaacagccacgttatcggttacttgatcggcgatttaaagcagtggggcagcagcatctattggtcactgattatctctggagccaatttcaaattagtctacgtgggagtgagtgaggcatatgaaggtacagccaaaggaacgctttagtttagcgtggcggtggttgccgctcgaattgctgatcattatgctaagcgtcggccttggatgggcgggcaatcggtggctacctaagccggtgtatcaagcatctgttgatattcagattgcgcaaacgccgcgttcagagctgtcaacagcccgtctaaaacgtcagcgacgccaggatatcaaagctatcacgcagttcaacgtgatgccacaccagagtgcggtgctgactcaagccagcacttatgcctatgcgcattatggcatttggcaaccgattcaggaactgagtgagtcggtccaagcggcaccagttgcgcggcgaccggtcttacgggtgacagcaacgagtagttcacggcaagtggcccagcagaatgctcaggcgttcaatgtggcgattaaagctaatcttacgggcttaaaaaattatcgagtgaagacagttaaacgtaccgtaacgcgtgagacgaacgtgattcgcggggcgctttggaagttaatattagttgttgggggcggcttggcgttgctgagtccgtacctcgtgaaatatggtcagggttgggggcggcacgatgatgagacgtaggggagcaagtatacagcagcaccgtaatgtgctctatctgattatcttcggaatctacttagcctcagtcacactacagacgacgacctttaacgagatgataccgcatcgagtgggcgttttgattgaattagcgactttggccgcattactgggcctcgtggtttgcttagataccttgccccccggccaaattattggcgaagtcagtttacttgtactggtgactgtcgtgacgctcacatcgggtgcgcattatttgatgccgacaatcatgttggtgattgcggcccgggaagtttcgtttcggcagatcattcaagtttatctgggcgtcgtggggacgattctcttgttagcgctagttgcttcggaagtcggactgattaaaaatattacgtttgcaactgccgatgggttacgtcagtcgtttggtgtcgtgtataccactgattttgcggcccatattttctatctgtgtgcggcgtatttatacttactggctcgtcgttttcgattagtagcgctattacctgtgttgtttggcttggcaatgatttaccagtttacgaaaacgatgacggatgtgattgctttaatcgttttgatcagcttgtacttggtctatatctatcgccgccagcttcggtggcttcggccgatgattcggtatagctttttgatgttaccacttgctagtgggctaattattgggttgtcgaatatttttaattatcaagaccggttgctggtagcgctcaataatatcttgtccacgcgactcgcgctagggaataacgcgttattagcatatggcgttaaattattcggccaagccccgattccaattaatggttggggcggcgatcggtttgaaacgtttaccaatggtgttggtgatgcaacgtatttcttcattgactcgtcattcttaaatatgttgatttcatacggattactattaacgctgattataattatcggtatgacctggtttttgtatcaacgtacgcggcaacacgattatttgttaccggtaatctttgcggccattgccatcagtagcatgtttgatcagcatttcttagaagtaacgtataacgtctttattctgatgttattcgctgatttaccaaattatcgaacggcagtcggtcccgcatttgaccgaccagtcgttattcgaagggggcgtcgtgccgatgaatcatcaacaggcttatcgggtgcagcggttgatcctgatcatcgccctgatgttaattctattcggtgataccgggatgaacgcggtatttagttttagccatcaaccacaaagtatctggttctatccgcagctcgtcgttgcattgataacggcagcgggtcccaacttattgttaatggccctgggcgcctatcaattgcggcgcacggcattgaccgtgccacagttgattcgccgagtcttatggataatgggtggaattaccttattctcactggccttctatcttgaagacttggtgacgcaaggcagtttaactagttttaacatcgccggcttttttaccgcgttagcccaagcgccggtgggcttttatgatattttatatgaactattgggcttctttgtcaccttgccgttgttaagggtgattgcacaccatgcgagtgttgcgattcagcaatacctattttgggcggagctcgtatttattggcatggtaccaatcttggcctatttcactggcttgacgacgatcagtgttaatccgccgctcgcgattacggccggttgcttttttgcattgatggggtattggttgagccaaacggaggtgttacaccggattacgcgagaacacctcttagtggcgtggctgctgacatgtgggtgctatgccgtgatggtgtcggtcacgatgtatcaagtgaatctggaaaagaattttgaccttatcagcagccagccatttgcccaaacctttcaggcaattccatgtttgacgctgtgggtgacgattgccacctggatgatgaaccggccacggtccaaagcagtacgccggcataactttgttcaaacggtttatggtgatatgctggtggccggtctactgattacaccatttatggtcattaatcggttgctgacaccaattattggtgcgtggtggcctggttggctctggagtatcgcggtgctgatcgttagtgttgaactagtatggttattacgacatgtccgctggttgcaacggatattaccagatttatttggtggctcccagttaataggaggctcagttaatgcgcaaaagaattgagtggatcgatattgcaaagggaatcgcaattttagcggtcgtggttggtcataccttgggcccctataacgggcaattcttcggtagtttgatcttcgcctttcacatgccgattttcttcatgttgagcggttatttgtatcactcacgcccggcacgacaagaatgtcagcgtggcatcattaacctattactaccgtatctcgcaacggcagttgtgctcttagtcgtaagtgcgatagcccgattattaccgaatccgctccttaatgcgtattttccaagctggcgacaaggactaattgccacggcatacggggccggttcggcagtgttcaatccgtggcactggcaagttcaaccgattggggccgtgtggttcttgctcagtatgtttattgcgctgcaactgttcaatggtgtgatgctactaacggcccgacgtcatcagcgctggcgtcaggccgttgtacggggcggggtgttcgctattttcgcaatcttaggtggttggctcggtcaagtcgcttatttaccgtgggccgttaacgccgcgttgttagcacagctctttttatatgctggctacctcgttaaacaaacagccctgctaagtcggatatcatcagcttggtatttattattcacgttcatgtggttagtgagtgctttccagggttattttgcgttgacagttccaacatcgcctaatctgttgattagcgtcatggggggcgttgctggcagtttgtgtatcattcgcgtcagtgactggcttagtcattatccgaatgcgcggccgattaagtggttaaaacgctacggtcagttatcgctagtggttctgtgttttcatttgatcgatctaaacgtgattggcattgaaggatggttgacgaatcatttgattacccatatgggaccactcgtgacgacgatcatcgcaatcagttaccgaattggcttcgtgacggttgccatgctggcaattccgcatcttccgggaattcgagcttgttttttacctcggcagtatctatttcgccggctacaacgtcgttaaattactgtgtataatccggcaaataccgagataattaattgacctaacagtcacgcgcaaatacttgcattattaaatgatggaaaatttatcatgatttgaggcacaaatttcataccagagggggactggcaaatgaaagtacaaatttatgtagcggctcataagccgtatcaaatgccacaggatccaacttaccgacctatttttgttggtgctgcgatccatggaggtgcaccacaaaattatcaacctgatgacgtcggtgataacatttcggcaagcaacccgaactttaacgagctaacagcgatgtactggatttggaagaactgtcatgcggatgttaagggcttgaatcaatatcgacgctacttgtctgaagcacccaaacgcaaattagccggtattttatcaatgaccgaaattgaaagtttattgcagcaatatgatgtcatcgtaccaaaaaagcgccattattatattgaatcgaattattcacattacgttcacgcacatcatcgagaaccactggacatgatgcgaacggttattagtgaacgtcatgctgcctacttagatgattttgatcagttgatgcatcgaacgtcggcgcacatgtttaacatgatgattatgtcgggtcctaagtttgacgactatgccaaatgggtctttgatattctgtttgctgtgcgtgaccggatcgatattgcggattacgatgtccaagaagctcgcgttttcgggtacttatctgagttcctattggacgtgtggatcaaccataaccaacttaagtacgtggaagtcccggtaatgtacatggaaaagcaacagttaccggcgaaagcgtataatctgttgaaacgtaagttcttcccacaagctgctaagcggacccatttttaacgtttgacatttcaatttaatgcagacaaattgaagtgttgagtaggtgatcctggtgtaccatgaacatcaagtaacgtgtatcgataaccaccagtacgcgtttaatagtgaccaggtcatattaataggactgacttgttaacgacagatagtttagttcgcgatacttgagtggtgacaaacctacagcctttttgaatgtttttgagaacgtaggggtgtcataaaagtgcaataaagatgcgattttaccgacagatagctgacgttgtagtaacaaacgcttggcttctgataatttaatatgctgaatatacgcattaattgaaaatcctagttcttttttgaacagtttttgggtgtaatcattgttcaagtttaaagtatgcagaactccatgactgttagtaagttcttgtggatgggcactgatgtaataagccgttaaagccacttgttttgatagattctggtaagaaacatgaaagtcgaagttgtctaataaattgaaataagtagtaatgatatcattgcttaatggccaaaatgtcgatgatgtacaaggtgattttttaataaaattaaagaaatataatcgcaattttaggaagtcatttaggttgagattgtgggtataactagctgctgttaagctaccaattaagcccagtagaagttgattaagtatttctgcatcgatccaatttataggatgaacttccttgaatttattgatgcgactaattgcgtgatcgaaatcacgtattttaaaaaagtgtatcagatcatgttccaataatgaaaaatttaaaatgaattcttgctcggatgatgagatacgcaagggagtaaagcgtgcaatgttcataattagagaccttccatcataattattaaatttgatattttgcaatacaaatcattcatggacaacacaaaaattattaaatgtaatttattttgtagtagaaagatgttaccattatgattaattaaggcaacaaggtaactttagcatgcttttgtaaaaaatcgtgctatatattctgcgttatcaaataggtaatgctatacttatcgtgaatttaactgagaaactttaattataatgtcccattttacacctatcctttcgcatgattttttacaaaatcgtgcgaaaggatagatttttatgttaaaaaaggataattttggagagcataaaacacactataagctttataaatgtggaaaaaactgggctattatggggattacgttggtttcattgggggtaggtactgttactatgacacgggccgccgcagcagattccgaagtgacgaacgattcagcatctcaacatgtgacgagcatctctactgatgcgtctaaaaatcagcatacgtctagtaatgtgattcttacaaatgatgataaaagtgttagtgcatcaattaatcaagacgctagcgcgagtgttgtcaataaggcggtcagcgcaactagccaagaaaatagtagcgttcaaaatactagtcaggcaaccagtacaagcaaacaagaatccagtagtgcgaaaaatactagtcaggcaaccagtacaagcaatcaagaagctaacagtgccaagagtattaatcaagcgacccgtacaagcaatcaagaatccagtagtacgaaaaatactagtcagacaaccagtacaagcaatcaagaagctaacagtgccaagagtattaatcaagcgacccgtacaagcaatcaagaatccagtagtgcgaaaaatactagtcagacaaccagtacaagcaatcaagaagctaacagtgccaagagtattaatcaagcgacccgtacaagcaatcaagaatccagtagtgcgaaaaatactagtcagacaaccagtacaagtagtcggaagattaatagcactaaaagccaagcccaatcattaacaactacgactacgggcaaagcggttcgtgctacctcgactagtgttaaaaagtactccaccaagacaaaagtgtcatatagcacattgttacagcagcttcgtacaagtaaagcgttgatctctgatgaagcggccttgactcatgtagacaaggacaatttcctaaagtattttagtttgaacggatctgcaacatatgatgccaagacgggaattgtaactattacgcccaatcaaaataatcaagttggtaatttttcattaaccagtaagattgatatgaataaaagctttacattaactggtcaggtaaatctggggtctaacccgaatggtgcggatggaattgggtttgcttttcacagtggcaatacaactgacgtgggaaatgctggtggtaatttaggtattggtggattgcaagacgctatcgggttcaagctagacacatggtttaatagctaccaagcaccatcatcagataaaaatgggagtgaaatctcatcaacaaattctaatggctttggttggaatggtgactcagccaacgcaccatatggcacctttgtcaagacgagtaaccaagaaatttcgactgcgaatggttctaaggtacagcgatggtgggctcaagatacaggagagtcgcaggcgttaagtaaagcggatattgatggtaactttcatgattttgtagttaactatgatggtgctacaagaacgttaaccgttagttatacgcaagctagtggtaaagtattaacttggaagacgactgttgccagttcttatcaagcaatggccatggttgtcagtgcatcaactggtgcagctaaaaatttacaacaatttaagttgactagcttcgattttcaagaagcagcgactgtgaatgtaaaatatgttgatactactggacatcagctagctcaaggaacagctaattatccagatggagcgtatgtcaatggtcggtacaccactaaacaattaataattcccaattatagatttattaagatggatgatggctcagttaccggcacaaaaagtttagatgccaatggaaccttaatccaatcgggtgacaatggtactgttatctatgtatatgtgcctgaatatatggctattgtcaagacagttaacgaaactattaattatgttgatgaaaatggtcatgcgttgaccactagctacaccgccaatcccatccatatattgaccgtgacgaatccggtggatggaacgacgacaacctactattcaacaattacaacatcgatagaactagatgcgacaactggtagaccagtcgattctggatgggtattgggtaatagtcaagatttcgatgcagttacaaatccacaaatcaagggctatacagtaacaagtactgatgcgcctaattcagatttgcagcatgtgtcagcgcagacggttactggtgattctggtgaccttgaatttaccgtcgtgtacaccaagaatgtcccaatcgtgacaacggaaagtaaaacggtcaatgagactattcattatgtttatacggatggaactacagcccacgatgactatgtggcccagcccatcacgtttacacggactatatttacagatgctgtcacgggtgaaaagacatatgggggttggtcggcagcgcaacaatttgcggccgtggatagtccagcaattaagggctacacaccagatcagagcaaaattagtacgcagacggttactggcgattccagtgaccttgaatttaccatcgtgtacaccaagaatgctccaaccgtgacaacggaaagtaaaacggtcaatgagactattcattatgtttatacggatggaactatagcccatgatgattatgtggcccagcccatcacgtttacacggactgtatctacagatgctgtcacgggtgaaaagacatatgggggttggtcggcagcgcaacaatttgcggccgtggatagtccagcaattaagggctacacaccagatcagagcaaaattagtacgcagaccgttactggcgattccagtgaccttgaatttaccatcgtgtacaccaagaatgctccaaccgtgacaacggaaagtaaaacggtcaatgagactattcattatgtttatacggatggaactatagcccatgatgattatgtggcccagcccatcacgtttacacggactgtatctacagatgctgtcacggatgaaaagacatatgggggttggtcggcagcgcaacaatttgcggccgtggatagtccagcaattaagggctacacaccagatcagagcaaaattagtacgcagaccgttactggtgattccagtgaccttgaatttacggtagtttataaggctgatagcacatcaacaaaaccggttaaaccagaacaaccaacgataccaacaacaccgacagaaccggttaaaccaggtcaaccaacaacaccgacagaaccggttaaaccaggtcaaccaacaacatcgacagaaccggttaaaccaggtcaaccaacaacatcgacacaaccggttaaaccaggacagctaacgacaccagcaaaaccagatcaaccgatgacatctgataagtcggttcaaacaataaccattaagtttgtgggtcaacgattaccacaaactaatgaaacggatcaacaacatatgacgcttagtggtttattgttattagccatgagtggcctattaggtctccttggtatggctaagcgacagcacaaagagtagggcagaagtatatgctaaatcatcaacaaatcaaagcccagtttgaaagtttagaaacactacaatctattcagaagcaagtgcaccaaatgtcaatacaaggacttgtaacaaccgggatttccatgcgtgagtgggaagtattagtctatcttgagcaacatgaacaagctagtgctagtgagttagcaaaagtattcaaggtcactcgcacactaatttctaggaatacttggcatctcattcaagataatttgattcagccacaaattgatcaaagcgatcgacgaatagtttggttgtcattgactactactggtcaagaaactattgggaaagttgctcggcaaatacaggcaaatctacaagcttttgattgtaatcacgaactggctacattaatgaaacagctcagatacttaaagcaacagttaattatactaaacaactaaaaagcaaccctaaagtgccccataaattggatttactccaatttatggggcactttaatctcaaagacccaataacttatttaactttgttgggcctttgtaattgatgtatagagacgacatatgaagttaatgaagattgttgcgtaatttgatagcgttgcgtaatacaggcggttgtaatagtaatatcagtccaagatacaataagacacctacaccaatttgtaaacaaaggtttaagtaggaagctgtcatggtgacgtttaggcgaaatacaaatgtaaacattaatccaccagcaagtgtgtatttccaaattccagtaaatagagattgcgcatgcaaaacatgtcgagtgatgaatagttggtagccagtgacacaaacttccgaaatcaaagtggcgcacatggcaccggccacgccccaaaaccaaataagtgggatgttgcaagcgatgttgacgagggccccgatagtgacggaaatcgtataggtcttagtctgcttagtcggtagcagaaactgctgaccaagcacgttgctcatcccaattaggatgatgacgggtgcctcaatcatcaacagtcggtcgactgcccaaaatgcccgtccaaaaaataggggtgcgagcgtcgttgcgaccgctgccacgccgagagccattggaatcgcaatcgcgagcacaaagtcaaaggacatgtataagtattgtttgacgcgttcaagttgttgcttcatgaagaggttggcaatgtggggtaacatgactgttccagtcgctgtcacgagcgctaaaacgagcttgatcaacttgtcggagtaatcataaaatccggcggcggttagcgaatccatttgccataacatggtcttattcaaggcaaggtaaaccgtcgtggcgatttgtggcacgaataatgctaatgagggccgcagatgccgaaagagattcaattgacgccagttgggccgttcgacactatgtcgtaagtatggccacagtgtcagattgcccaaaacttgtgagcccgctaaaatcaaaatgtagattccggtgtcttgccgagtcttcacgaatgcgaaaatcgcaatcacagaagcaatcttgacaagcatgttacggagtacggttttcttgaaatcctcgagacccataaagtaccaagaaatatcaacagcacccgcaatgatataaaatgattgatagaaaaaataaatttgcaattggtgctcaaaaaaaagaaaaactaaaaaggcgagataagcacaactgatggtcaataactgtaatatttcaatttcccaaaaagtttgtgagcgttgccctcgattatcgcgaataaaggcaatttcgcgattaccataaattgtaataccgaccgttccgaacaatagaaagtaagtaatgatcgaattggtcgttgcattgataccgacgccggtcggccctaagacccgtgagatatacgggacggttaggaggggcgttagtaaaattaagaggttataccccgctgtataaaagtaattccttatgattcgcatgagtggctccttgtggcagttaagcagtctaacgttgaatttctcaacattcaattcattgtatcacagccaattagccggttgatagtggttttaactggctagggttggttattaacaaacttattattttataaattagaaagtatttttattgttaattaattgaggaacaacatagttatatcaacgataattaaattgggagactggcgtaatacttggagcaccccagtgagttgtgttcgtgtgcacttatgatcaaggactgaaaatttggccggtagggtcgtggaatcaatgatgattgcaggagctgggagataactttgatggtatggcgagcgaatggtacgtggtgtgttcaaatcaatgggttacaaaaacgcgtaaccaaattcccccttgagtttggttgcgcgttttgttttttatgtttaataagcgccattaggcttgaacataatgaccacggtcttgaacagaatgtagacatcaaatgcgacactccgtttagaaatgtaagttaagtctaacttaaccatttcatcaaaaccgacactgttacgaacggttgcttgccatagaccggtacaacctggcttgacggctaaccgttgtttgtcatagtcggaatattcttcgacttcccgtggcaatggcggccggggtccaactaagctcatcgagccttgaaggacgtttagcaattgtggtagttcatcaatgctatacttacggatgaatcgcccaatcttagttacgcggggatcatcctgcattttgaacatggcaccatcaatctcgttatctttaagtaatttttccaacaattcatcggcgttggaaaccatcgagcgaaatttatacatcttgaatgggacttcgccacgacctaaccgtgtctgcgagtagaagacggcgcctttaggatcttcaactttaatcgcaattgcaattagcaagaagagtggtgataagatgatgaggcctaagaggctagcgacaaagtcaaacacgcgtttaatgaaccgataaccataacgacgatgctgacgcccggcgtcaatcgtaatcggtctgatttctcgttccttcaattccataagtaacaccctatgcttcctttaaatattttcccccgtaaatcacagccaggttaatctattactactgttcgggttaccacaaactgactatgtatgaaccatattgatacaacctaatgattatagtacaaaatagctatcaagtaaatatgcttgatacgattaactttgcagccttgctaatctcattatagcaaatattgtactggaataaaccaatatttgaagtgcaatcgtgcgacagccggttttagctattttggctagtggaagtttggttaactataatttaccagcattttaacaagttgcaattattagcaacttaaaagcgcgcaactgttagtaaaagtggtgcgtcgtaaaattagttaatgaacagaaaagatgtcagctacgtattctaatgagttatgggtttaggcctaataattgtgaccgggataaaatatgaggggaaagtgaatcaatctatgaaaaaataattgaggtgattatagtactaaaaacggtatgatagtgatgactctgccaattggtgaataaatatttgctaagcattaactatgtgttaacctagcaatcgcgtaatttaagacatacggttagaataagttataagctgaatgaagcgtaaagagctcgttcttatcacggtcattaagtagaagatagtccaaattaatgaatctttttgtggctatggttacaatggctgctgatattggcccatcgttcgaaagtaagctggcaaattttaggttgctacggtggctttctcgcgtgatttctcacacattccccctaggttttcaccaccgttcaaggtacaattagattagagctcaaattcaagtgaaaaggatgtccgatatgaatgacgattggatcacggtttttcccgcggattataataattcgtaccacttaattttgaaacgggggacggcccattatgcgtactactactttaaggttgataagctagatcaacgggtcattttctatgatgacattgagcgtagcggtatttcaatcaagactcagatcacgcggacgtttatgcgggcactggttaaagcaattgattggcatccggtcggtaacagtattattatcgagatttaccctgtcgaccgtcaagagacgaaagcgatacggctatcttgtgatatttagctctgaagtgattgccaagagtaagacgactttaaatgataaccaaagaatccccggtcaattactgaccggggattcttgtaattgcaggtaacgcgaggttaagcctttggtgcagtgacgattggtgtctcgatggtttcgacgtacttagcggcaagcggttcggcgactaagttttcgccatctttcacgaatagcttggtggcagcgaggtccgccattgccttactaacaacgtctttactcaagttgtcgttggcgtagtgtaacttcaagtggtgaaccttgtttgtgctagtcttaaagcttaagtctaaagttttcatgggcgcttcctcctattattatgggtgtgttaagcgatgggttgtggatcgtagcggtaggcgttggccaagttagcggccgtgaactggtcgcccgtcaagacttcgacgatcttgccaaaagcggcaagttgttcgtcagttgcgtcttgggcgattgcgttaaaggtttgcttacgttgttcgtccaattccgtagttgtttgaacagtcagggttgcttttaaccaagttttagtcatgatgagttcctccttgaattttgtggtggtaggctggccagcttacattaatacagacggttgagcctgacgatttgtgcaaggtttgcctaaacttttttgactagcacccatttaatccgcaaactcggtgatggttcgaacggtaatactgatgatcttctcagcgaatagtggggtcagaatggtaatcaagctagtaaagtcgctgtctgtcagttcgcgacctgctaaccagtgttggtggaattggcgttgattagaatcagttactgtgagcagtacatgtgtgtgcatccaaatatgcatcgtgagttcctttcagactgcgacagtcttgttagttaattggtggtttgttgctggtaaagcttgtgggccttgacgagcagactggcccgccagttgtagactgttcggcggctgacctggtggcgccgcatgatactgctaacggtctgttcctcgaaaaagaattcggtgagataaatccgctcacctggccgacattgaacaaggagttctgttaagagggcggttaattgccaatgggtctcttgttcggtcatgggatcaatggtaatgggcagtgcgtgttccaagttgacttgcgactgggtgcgcaaagtttgtttacgtagatagtcgacagttcgccacttgatacggcgaaatgcaaatttacgaaaatctggtaaattagcgggcaattcgggcgcgtagttctggtaagcagacagccaagtcaggtgggccacggttacacaatcttcgaattgcgggtggtatttggtgacttgggcggcttttaaagcgccgtatagtaaacgttggtgctcgggtcgggcgagtaaatcgaaagccatttgattatcaaaacggtcagcgtgcatctaaataaccccatttatgagcgatttccttggccaaggttgatatcagtgtagcgagcgatcgcaactgacgcaggtcgtgaaaatggactgaaaagtgacgatttattttcattattaatgttccaatgagatttggatagattacagaccaactactttcctagattgtacgtaattgttatgatgtgattaatctaaaataaccgcggacagcgggggctcggctggtgaatgttagagataaataccgactttgagggggatttaccatctatgaaccaaaatattgacgttccgcatcacgttaacactttttggcagtgccacgctggtacttgggacacccgacagccacaacgattattaatcatcgcgcaacgctcagaacttgccacaatcgacgtgctggagacacttttcctacttgacataaaacacctgacatgtgttgaaaatacgctaatctttgatcgtcaacggggattgatcaagacaaaactgacgacgcgccagatcatgatgaattacgctggccgtctggggttatctgggacacagttgatcaagcaactcgccggtgaactcggtttatcgaaacacaagttacctgtgattcacggtgatgcgatcctgatgccgttaagtacggccaaacggggaacaaccagctggtacaatcggcattatttgaagcatatcgaggctcaaggatttatgacggccttagtttatgatggtcaaattacgattcaagtggatatgagcgagcgcgtggccactcgccaacttgcgaaggctggtcaattacaagcggcgctccaggaacatcatcgccggcgattagtgcccgatcaatcggtaccttcaatggcggacacggatcacgagatgatgcagtcgtatactgaccaagtcttaaagcactttggcatcttagcacttcctggagaaattagttgtttgacgcggcgatttttcggtaaactataggagtaaagattaaatgatgggagttggtgtcgttgactaagaaggtcacgaagattgtcgcgcaaaagcgagctggacgttataacatttatttagacgagcagtacgcttttccaatcagtgagtcggtgatgatcaagttccgcgtttttaagggcatggaagttgatgaacaactgcaagcagcgatgattgcggcggacgatgtctccaaggcgtatacgcgcgcgctggattatctctcacatcagttgcgtaccgaaaaagaagttcatgacaagttacgggatgaagaaattgacgagtcggttatcgacgcgacgatgcaacaattacgtgagttgcggttattgaacgaccaacagtatgcggatgcctttgtgcggacggccaaacggaccagtgacaaggggccacgggtgattcggcagaacttacgacaaaagggtgtgggcgagcagctgattgatgacgcgctggccgggcagtttagtgctgaagagcagatcgataatgctagtgaacttgcgcgtaaactggcaaaacggtatcaccgccaagcttttaagaccatgcaacagaaagttcgccaaggtatgatgacgaagggctttgataatgacacgattacggccgcgattgcgagtttggcattagaacccgacgaagatgaacagtgggaagccctcgttgcacagggggcaaagttgtggcaacgcaatcgcaagtatgcgtttcgtgaacgcatgatgcgcacgaaacgcagcctgttccaaaagggcttcatgatggacgatatcaatcgatttatcgacgaacaagttgctgatgaatgaaaaggttgaattacctgcccgcacgccataaaaatctggtataatgtttaatgaaattcgatgaaaatttaccctcattttagaaagttgggttaatatggcgcgcgaggctaagggacctaaggaaggcgacttcattacgatcaaaagctataagcacgacggaagtttacatcgaacttggcgcgatacaatggtactcaaaacaagcgagaacgtactaattggttgtaacgatcacacactagtcaccgaggatgatggtcgccggtgggtgacacgggaacctgcaatcgtttattttcataagcattattggtttaatatcgtggcgatgattcgcgataacggcgtttcatactattgcaacttagcatcaccatacgtgttagataaagaggctttgaagtacatcgactatgatttggatgtcaaagtctttcccgatggtgagcggcggttgttggatgttgatgagtacgaagaacacggtgcccaatggcgttattcggctgatactgatcgcattttaaaagcaaatgtgaaagtcttagttgattggatcaaaaacaaaaaaggcccgttttcacaagactacattgatatctggtatagtcgctatcaagaattatcacgtcggcaatagctctgctgacggtctgtcagcggcgtaattaaagtacaaagggagtgactccgtgctggggtgctcccttttgtgttctggttgcgtctcgacattgaataataagaggtgattaccagccgtcatggttgacacaagtcatgataattaggacaataaaaaacgacccacaagtcgcctctgtgggtcgggtgaaaataggaattacacttttaagcgccaaagttgactggccgcgaatagccaaccgcgtgccaccatggaacgtagactttttcatttttgacaccattgtcctgagcgtcaatcatctttccaccaccaacataaataccgacgtgtgatatcgaacctgtgccactaccaaagaagactaaatcgcctttttgggcgcgctgtttggaaattttgggatattgtcggtactgagcttgggccacacgtggtaaggttttctgcgcagcttgctggaagacatacttagtgtaaccggaacagtcgaacgtgttcggaccgaccgcaccatagacatagcgatggccaagtttggatttggccacgttatagaggttggtgaaagatctggtgctcttcttgagggagccggtcttgacccagccacgaacacgggtattagcactcgttataaaataataattagccgtggtattattagctaagcgaatttgccgttgttgggtgacaaaccaagtggtattaccatattgtcgaagcgttccccgactctggattttaagattatttgcggcaccactcatgttatagaagccgccctgagtattcttcgtcaggtaggcgcttttagtaagattagtggttttaatgacgcgattcgttgagctggcatcgacgtttggtgcttgccaaagccccaccgtgaggcctaaaatagcaacaatcagtgtgataagacgttgtttcatatgtatttcctccccgaaaatccccatgtccatctcattcaataacgctgaccccatcataagcgctcattgtaacaaagttgttgcaaatgagttgcggttcgattaagtaatgtcaacagcttgagtggattaacaataattgattagatcttgaccgataggagtgacaaacttggcttttttgaagattgataacggtgaattacttaagaatattcggcaatttgccaagaagaatggactgaccttagcggaagtggcgaccttagcaggcttaagtgcgagtgccatctatagttggaaaaagcacacgccgtcagtcggtacgcttaaggaagttgctcaagtgctcggtacgagttataccaaattggttggtaaggataaagaaccgacagctaaggcgatcaatgccgctgctgttgatcttaaaaaagtgattgaaaacaagaaaaaccaatttgaatacgacggtcagccgattactaatgaacagatgaaaattatcagaaacgtcttgaagtcgatgttcaagaccccgcgactttaattttaagtaaaactcggttcttttaggtgcaactgggacctgcttagtgtaaaatattgctcagttacttgaataattgctagcagcgcttgacgggtttgaatgaatggtgcacaatggcaacaattatggaacggattgggagatgggcgtatgaaaaaagttactaccgcattagcaaaaaagaatatcaaccagttgttaacgattgttaatcaaggccacgataccattgaggtggaaaatcccagcacccaagattcagcggtaatggttagtatgaaagactggttgcagattgtcagtcaattagccaaaacgaatcatcatgacatggaatttagttaaataataacaaagaactaatcgtgccagtcaaggttcgcttagtccaataagctaaaggcaccaccaacatagtcatgtcggtggtgcctttttttgcaagtcgtagtacctataatagtgcggattgtgctaagattttctcaatttgaacgccgactgtgttcatggtcgcccattttgcctggttggcaaagaagaccatggcaattttgctgtcgttggagccgatatagaggctatataaactgttgtcggcaccaccaatgcgaattgtcccatcgtcacggtagtagattccgccagaataggtgggttgtaagttggcggccagttctcggaatccagccgaagtgagcagatgaccatcgaccagattatgaatgaaggtgtaaaagtcacccacactggcatagaggttgccacaaccaagctcgcttgacagtaagttagtcgaaattgaccggggagttgaggcccctttactgaaggtgtatgggagcggatgaacagcggtggctggtatttggttataaacgaacgtgtgctgcatgttgagtggttgcaaaatatcagcttcgaggttggcactaaacgattggcccgttaattggtcaacgatacctgctaagagggtgaagttggcgttggaatacgaccactggtgttggttagtagacgtcaaatgttgcaatgtgaagtcgatggcttgttgatcagtgctcaaggcctgatctgggacaggttcgcccatctgaatccccgaagtgtggtcgagtaattggcgaatcgtaatcgactgtgcatagggtacttgcgggtaaaagtgagctaaagttgtgttcattgtcagttttcctgcattgatcaaatgctgaataattgcaccagtcactgatttttctagtgaggctagtgggtacgactcgtcaacggtattggctaggtgctgattcaaatcagctgagcccaaagtcaaagttttgactcccgctggtccattgttagtcaggagtagggtgcccatgaaatgattagtggtcatgagctgattgatggcttgtaatgcttgctgagccgtgtatttcgtgacgggtgcggtattgactggcgtcgtaccgggggcgcccgttacagtcgacgtgctcgatgttgcggttaaagtcgctgcgcttgatgtcggggttacgactgtctctggtgtgaccgccgacgttgtggtgtgcctggcaggttgtgtggcactgttctgactaacaacagacgttccagttgcagtcggtttacttgatgtcacggcgaccgattgtgttgtagccgctgatgtcacagttttgtggtcagtttgtgtggaagtggcctgactaacttgtgttgacgtgctgtttgcactggtcctaattggcacctgacttacagggcttatgctggtactaggttgacttgctggtcgcgtagcggttgcaatctggttagtgtggatctgctgatgcctaagcaccgtccccgctgtggttgccggttgagttgtggtggctgaggaagcggcattagccggagtagctaccgaactgactggagcttgatgggtcggtgccgtggcagcacttgaatgtaaccgaatcgtcgcatgtggttggactatcactggtcgttgaatggtgtgatggtcgttcgactgggctgatgatttgactggcgttcccataaaatggtttccctggagcgttgaagtggatttctggttcggtggtgtaactggtgttggtgcattcacatgttggggatgtccggctgggctgttggggtgcgctagtgctgggttgttctcggcgtgtcgaaatttaacagtgttgttaggattctgggactgtcccgtagtagtcgtgcctgacttggacgttgttaaagtgttcccagtcttggcgtgaaggggcataactgttttggttggagtgattaaatgttgactttggtgcgaagtaggcagcgtgaatcttaatggcatcttgttgactgaaacccggatatgccgaccctgtggtcctaggatttgaatgtattgcccacgagttgtccggatgggcttgcccacacgtagatgaagttgattcatttgacgcgtacttaattgatgagtcatgatcagttgcagctgccggttggttaaaaatggcagcgtcgtggtgtagatactcaattttgctgcccggttgacgggtgttttaaattgttgtcttgtcaaatgcttaatgagcggtattactgtgcgtgcggcgacccaaccattaaaacgattgccgatgatgtgaaagtaaaatccaccaaggccacgatgctgctgagtgattttgaaagccgtgtttatgggttggcgggtgaagtagccgcgccgtaattggtgttgattagttggcaattgcggatagattgtgactccgtggctggtacgtagacgaccgtcaactggtctagttgtggcggtggccggttgagcaagtgccagactactgaagctgatcaaggtcagcatggtggttgcggataacctttttttgaacgtcaaattaattcccccttttagctgctcattaatataaaacggtaatccgacaattgcacggtttttcgaatcggcgttaaacttcctaacatggtttggcaagatacggtgttttttaagttaacgttgttttgacagagtaaataaataaaaaccggttaatacgttgtatacgtattaaccggttagcataatgattgttagttcgttgacgtttgagtgctgattagtcggtctgactttcagcgtacttggtcttgatataatcagctgaaacttgtaattttttcaattcttcgtccgtgagatccaattgaacttgttcgacgatcccgtcacgaccaacgacggctggatatgaaaggtatacgccgtattcttcccggaaatttgaaacggggagttcggtgagggcgtcattcaagaccgtgttggctaagcgcaccgcggccgttgccacgccataacttgtatattttttgccatggaagacccggaagccaccgtcgcgtgattcggcgtctagtttggtcaaatctaaaccgcggtcagcggctaatttggtaattggttgacctaacacgcgtaccgttgaccaagctgtaaattgggaattgccgtgttcacccaggttgtagccggccacggaccgtgaatccaggtgtagtgcactggcgaccgctcgtttcattcgtgcagagtccagtagtgtccccgtcccgatcacatgattctttggcaacccggtaaccgcttggtagatcgatgtgatgacgtccacgggattagtaatgacgactagaattccgttgaaaccactggctttgattttagcagcgacgtctttgacttgtgtgctggtaaagggtaattctaggaagcggtcattagttggtgaatcttgtaacttaatattcccgatagctgagataatgacatcggcatcaatgaggctgctatagtcattgataatgatattcgtgtgataaggtaaattaggcattgcatcctgaaaatcaagcgcgtctgcttcaactttgctggtgttcgtatcgatgaggacaaggtcatcggcaaagccattggcgacgatgtagtgagcggcggttgaaccgacgtgtcccattccgataatggcaattttacgtgacataatgtagcgctcctttgaaagtttatcgttcattaattaaattaccattattctcattgattttaaatagattttgtgagaaatatcgaaatcgtattcggactaagtgaaatagggtataattaacgcattaatagttgcaccaagaaagggaggagcgcgagtgtttaagcgcctaaaagattcggccttgttattttggtcacttgaaattttgattgtggcgaccttgatctgggtctgcacgaacattggttttttgtttcagccaatcggcacgtttttaagtgtcgtgttcatgccaattttgatttcaggatttttattttatatgttgaatcccttggtcaagttgttgactaaggttcattacaagaagtttcggatttctcgaaccggagctgtggctatcgtatttgtgctattattcgggttactggtgtggggagcggtttccctattgccacggttagtcagtcaggtgacacaactgatttataacctaccaagtattgccactgagatgcaaaaagccgctactaagctgatcaataatagttcggtactgaaaagaattgacattagctcgtacaccaagcaattcaatggtgaaatcagtaagtattctcagaactttttgtcatcattatcaagtagtgttgttacggtgatttccacgattacgagtgtgacgatcatggcaattacgattccagtcgtattgttctatatgttgaaggatagtgagaaattcattccagctatcagtcggttcttaccgaagaaacagcggcctgaagtcattggtttactacaaaagatgggcgacacgatttctagttatatcagtggtcaggttattgagtgtctcttcgtggggacgtttacggcgattggctacatgttgatctcgcaaccatacgggttattgcttggcgtgattgctggattgacgaacattattccgtacgtaggaccttacattgggatcgcgccatcactcatcgtggccttcaccaagtcaccgatgcaggtagtgtacgtgattatcgtagtcgtgattgttcaacaggttgatggaaacttaatctatcccaacattattggtcggacactcaaaatccacccgttaacgatcattattttattactagcagcgggaaatattgccggaattcttggcatgattttagcgattccgttctatgctgtggtccggactgtggttatttacctctataatattgtcgagttacgaaatgaggagcacttgcgcaagcaaacgacggtctatcagccgcaacctgctaaggcgactaaagcagacttgacgacgaccactaaatcaaaaaagtagtctgtgctataattggtgaattaagcttgaacgtggcataaggagtgattttttgaagaaagtaattacgtatgggacattcgatttgttgcataaaggccatattcggttgcttaagcgtgcacgggccttgggcgatcatttgaccgtttgcgtctcgaccgacgaattcaatgctaagaagggtaagcatgcgtacacctcgtatgaggatcgtaagtatattttgcaagccattcgctatgtcgatgaagtgttacctgagaaaagctgggatcaaaaaatccgggatgtcgttgataacgatattgatattttcgtgatgggtgacgattggcgcggcaagtttgattttctaaaagactactgcgaggtggtctatttgccccgtactgaaggcatctcatcgacgcgtatcaagcacgatttagggatgcaatccaaggattaaccactaagctagatgatttatcagtcacaaaacaccgccgttacccgcaacttcaagctgcgtaacagcggtgttttaattaacagttattagtaagtcacgcctaaatgaccatggactggttcgatgcggattatagttagcattcagccagttcaaagggcttaatggaagatggcgttgagcgccaacacgcctccgagaccgcagacagcgatgatcgtttctaacatcgtccatgtaagcagcgtttgcttgacggtcaggtcgaagtattcccggaacatccagaaaccagcgtcgttcacgtgagaagcggcgacactcccagagccgatggcaattaccatcagggcggggtcgataccagcttgcgtcattaacggcgcaactaggccggctgccgtgagggccgctacggtagcggagccgagtgagacccgtaagatgacagcgactagccagccaagaatcagtggtgagatgctgctgccactgaacaactgggccacggccttaccaacacccccatcaattaagatctgtttgaaggcgccacccccaccgatgattagtaataacatggcaattgacttagtggcatcttcgatggtggccgtgatggccttattggtcttgtgttggtgaatccccattgaccagagggcgaataatagtgaaattaacatggcaattccgggtgccccaatcaaacgaatgatttggtcaagggtcgacgggtttttaggtgtcacaccgtgatcaacgactaattcgtagacggtggtgattgtcatcagaatcacggggaagagcgccgttaagacactgagtccaaacccgggtgcttcagatactttgaattgacgtttgttactgctaagtggcaggtgtggtttaccggtgaatgcgtcaggaaccatcttttgcgcccagcgtgaaaagagcgggcctgcgatataaacagttggaatcgcaataatgatcccgaatagtagcacatgacccacgttcgcatttagcgtcgtcgcaattgcagttggtgccgggtgcggtggtaagaatccgtgagtaacagataatgcggcgcccatgggaatccccagatagagaacgggaacttgtgcttcgatcgcaatggcaaagacgattggaatcaacaagacgatcccaacttcgaagaagagggcaatcccgatgataaatgaggcgactacgatggcaatttgtagccgtttgcgcccgaaaatatccaatagtgtcgtggaaatcgtgtaagcaccaccagcatcggctactaagcggccgagcatggcaccgaagccgaagactagtgctaactcacccagttgactgccaatcccgttctgaatactagtagcaatcttagttaatggcatccctagtccgattccgacgacgacggccgtaacaatcagtgcaatataagtattcagcttgaatttaataattaatagtaatagtagtaggatgccgagtgtaagaacaacaaatggcatagtggacactcctaacgatttagagtagcaatttcgtgatataacggtgccaattgcgccgttacgtggtcaaaaacgacttggtgttgatgatataactggtggttggcggcgttgggttgataagtttcggttgcaccaatcatggcgtgaatcgcggttaaatcatcaatatgccccagtgccttgagtccaatcacggccgctgctagacaggaactttcgaagcttgctggaatcgtaatgggttgtcccaatacgtcagtcaaaatttgccgccataaatttgaacgggcaaagccaccagtggcccgaatcgcatgaactggttcggcggctgccgtcaattgtaggacggtattcaggttcatcacgataccctctaagaccgcacgcgcaatatcggctttggtcgtggtcgtggtgacgcccagcagtgagccgcgggcatccgcattccagagaggcgcgcgttcaccacttaagtaggggtgaaataagagtccgtgggcaccgacgggaacggttgcggcaagcgctgtcaattggtcgtatggatcttgttgattcgcacgggcggtttggctttcagtagtgaagagctcatcgcggacccaccggaagacttgaccaccgttattgatcggcccaccaacaatccagtggtgcggcgcgacgtagtaacaaaatagtcgaccttcaggatccaagtatggttgttttgtcatcacccgtacagcaccggaagtgccaatcgtaatggccgcaactcctggttcatcagcccccacccccaagtttgaaagggcaccgtcacttgcacccatgataattttcgttgtgggtgcgagtcccagggttgatgctgcgactggtgtcagtccatcgatcacggcgtcggtatcgaccaatggtggtagctgcgtgcgggtgatgtgtgcatagtcgagcgcgacaggttcccaatcgaagttataaagattgaataggccagtggcgttggccattgaataatccatttgaagttggcccgtcattttgtaaatcaagtattctttaattccgaccacgtgacaggtttgtgctagtaattccggtgaatgatgggcaagccagtgaagcttaaccaggggactcatcgggtgaatcggcgttcccgtaaggtgatataggcgatcgcccaggggttgacttttcaattcagcggcgtcttgtgcggcccggttatctgcccaagtgatgacccgggtcagcggctgtttctgactgtcaagtaggatcaaactgtgcattgcggatgaaaaggcgattccttcgatgtcttcgggatcaatgccagcacttacttgatggatggtcgcttggactgcctgccagatttcttgcgggtcctcttcggccgtggtcacggtatcatgatagagtgggtagccaacgttggcactcgcaattacgtgaccctggtggtcgtacaagacggatttggtacttgtcgttcctaaatcagttccaataaggtaagtcatggtgcttcgttcctcctattcgtgatcgacagcgtggccaccaaactcgttacgtagggcggcaacaactttaccagtgaatgtgtcatcggtttctgaacggtagcgcatcatcaaggccatcgcaatgaccggggtggcgacttgttggtctagggccgtgtctaaggtccagcgaccttcaccggatgaatgcataacacccttgatgtcatctagattaccatccttgctgaatgcatcttgagctaagcccattaaccagctgcgaatgactgagccgttattccacattttggcgacggccgcgttgtcgtaagtgaactgactatgctgtaaaacgtcaaagccttcacctattgctgccatcataccatactcaattccgttgtggaccatcttcaggtaatgaccactgccaacagggccggtgtacaaatacccatcgggagcggcaatcgctttaaatagtggttcgacgacttggaaagtggcggggtcgccaccaatcataaaattgccgtcgtggcgtgcaccagcttgaccgcccgacgttccgacatctaagaagttgatgtggtgacttgccagtaattcgccgtggcggatactatcttgatagtgcgaattaccgccatcgaggacgatgtcacctgcacttaaagtctgggctaactgttcgataacgctgttggttgccttaccagcgggtaccatgatccacacgatccgtggtgttggcaactggtcaagcaaattggtgagatccgtggccgtcgccaacccgtgagcactggtggtactaagattagtggggttaagatccattcccactggcgtgtgcccgttatcctgcatgttcaacgctaagttcattcccattttacctaagccaatcaatcctaatttcatgatgaaacccctcttttatatgaaaaatattaagtactttttgtattcgcttacattgtaataaaaccatttacataaatcaaccatatatttgtaaattattttcattagactgaaaataatggcaaccaagcccggttttacaggcctgattgccaagaaaaaatttgttaaattgctgaccaaacggctgcgccgatacttgggaagagggtcacgagttgttcacgttgcgccggtgtcaattgatactggatcgctggtagcaacgtgttaatggtattttcggcctgttcaccgagttcagcggcaccaatcaaccggtgctggtcatccgtcacgagtaagttatggccggtgacatcgcgcgttgtctgccggaaccagtcatcctttaaatcattgacggtaactttgacatcatgagtgtcactggttggaagtgtaccaacttgggccaatcgtggggacgtgaagacgaccgatggaatggccggatacttgatgggggcattggtgtcacccgtgaataggtgggtcaggtattgcgactcaaagatagcagtgggtgttaattttggttgatccttggcgagaacgtcaccggatgcgtagatgccagcgacactcgtttgcaagtggtcgtcgacggtgattccagctgctgtgtagtccacaccgattctttcaagtcctaagtttgcggtgttgggctggcggcccgtcgcatctaagatccagtccgttgtaatcttgtcatccgcactgaggacttcgaagtggtcaccagtcgacttgatcgcagttggcacccattcacgttttaggactaaaccttgttccacgagaatggccaataatcgttcaacgaatggttggtggaattgacgaagcgcttgatcaccacgcatgagtagggtgacctgactgccggctgttagtgccatgttggcgaattcgagtccgatgtagccggcaccaatcacggtgatgtggtgtggcaaagtggttagattcaaaaagtcgttactgtcatgggcgagttcggtgccgggaatgtccaaacgatgtggatgctgacctgttgcgatgacaatcttatcggcggtatacgtcttgtccgccacctgaatcgtatggtcgtcgacgaacgtcccgcggccattgatgagggtcacgccggcactagtcattaagccagcaatcatatctggtaagccggcgatgacgtcgcgttcgtggtcgaagttggcttgccaatcaatcgtcggttcaccacgcagaccgtatccttggaagttagcaacttgattttttaatgctaccggctggtctaaggtgattttagcgttgcaaccccgattaggacaggtaccaccaatcaaatcagcttcaatgacggctacttttttgccacgagccgctaacggaatggccccgtcaaacgttccgtgaccgctacctagatatacaacgtcaaatttttctgacatattaaaatcctcctcgttcccaaatcacagttatttaaaaacaaatacattgtacacaacttaatttaacatgccaaataaaacgcggccttaatttaaaagtatggccctgaaatcgattgcaactggtctgtcatgactttgttaagtgaatttccaccgaatcggtgcaagatagtcggtggtactggattttttggtcaaatatcagtaaaatatgtaaggctatgtttttttacggtgggacggtaccaccgtgcacgttgaatatacaggttatgatgaaaggaatttttaatgaataagacaaaattaaccgccgcggtcaatacccggcgtacctttgcgattatttctcacccggatgccgggaaaaccaccattacggaacaaatgttattgtttggtggcgttgttcgtcaggccggaacggttaaagcccgtaaaagtgggaactttgccaagtctgactggatggaaattgaaaagaagcggggaatctcagtaacgagttccgtgatgcaattcgattacgatggcaaacggatcaacatcttggacacgcccggacatgaggatttctcggaagacacttatcggactttgatggcggtcgattccgctgtcatggtcattgactcggctaaggggatcgaaccacaaacgaagaagttattccaaatttgtaagatgcggggcattccgatctttacgttcatgaacaagttggaccgtgatggtcgcgaaccattggacttgttgaacgaagtcgaagaagtcctcggaatcgaaacttatccaatgaactggccaatgggtatgggtaagggcttaaagggcttatacgatcgttacaatcaccgtgtggaactttatcataatgaagctcatggcgaaacgttcttaccactagacgagaacggtgagcttgatcctagtaatgaattgaccaaggacagtatttatcgtgacacgttggatgaagtcgaattgatcaacgaagctggtaatgattttgacgaagctaaagtaatggcgggagacatgacgccagtattttttgggtccgccctcaccaatttcggggtcgaaacgttcttgaagacgtatctgcagtatgcgcctaaacccgctgctcataagactcgtgatgaccaagtcgttcagccaaccgacgatgaatttgccggttttgtgttcaagatccaagccaacatgaacccgaaccatcgtgatcggatcgcctttgtccgcatttgttctggcgaatttgaccgggggatggacgtggtcttgcagcggactggtaagaagatgcgcttaaacaactctacgcaattcatggccgatacccgtgaaacggtggaaactgccgttgctggcgatatcgtcggcctctacgacacaggtaacttccaaattggagatacgatttacgctggcaaaaatgcggttcaattcgaaaagttaccgcaatttacgccggagctcttcatgcgcgttacagccaagaacgtcatgaaacagaagtccttccataaaggtattgaacaactggttcaagaaggtgccgttcagttgtacacttcatattcaacgggtgactatattctcggtgcagtcggtcaacttcaatttgaagtcttcaaattccggatgcaaaatgaatataattcggaagttgtcatggaaccaatgggtagcaagactgcccgttggatcgatcccgaacaattggatgaaaagatgtctagttcgcggaatctattggtcaaggaccgttacggggcaccgctcttcttattcgaaaatgcctttgccgaacgctggtttgcggataagtatccggatgtcaagctgacctcgaagctctaggatttatattgtggtttacacttagctgaccaatctagttagattactgttcgtcagtcgatgtgcgtcctatttcgacctccggggctgggtgactattgctggaacgtaagccgacatcaatttgagttaacgcacaacccgcgttagctcaaatacgagtcttattctaagccggaagaaaatcacttccagctaagaataatttggctactgagcattgcctagccaacggattaatgcggttttggcattagtccgttggcgtagcaagcacaggcttcagtggcaccgagcacgtttcgggaacccgctcgaatggctgatgaacggccacttaacttggtgcaattgggcgctaactattttgatactggaactttgaataaaacatcagggtgcataaacgactttgtcgcacattcaattttgactacagcggcttaagatagtgagctattccaatatcattttcagtctgatagttgcttagcaaaattaccgtttatgaaaaacaacgaccaattcatcaaaaattgggcccctcaccgtctgctattcgaatactatcccgactggaaggcgtttctgccaatgctcagcggtgaaattccacttagcaagcgtctttggcttggttagtggaagaccagtcagtatttaagacgtggtcttcggcttaaatctgtgtccaccgcgttccagcaattggcagaaatgcctggaagtcggtgtaggacgcacctaccaaaaaagtttacgctaactcgaacttttcccagtgggcctaagctggctgctcttgatttaacggatagaaaaattacaacgtgtctcaagcaaaagcacgaacaaatatgcgaataattcataaaatgatggggctgccaagttgatttggcggtctcatcattttttgtgtggcgggaccggatagaagtgatatgagaggttcttctaacatgcttatcggtccatgtaaattcaccatgtaaaccaacgttgtagcactgctaaggtgagagaattacgatacaatcaatctgcaatttagattgtagggggcgatgagattgaaaataaggggacgctggatgctgggattgatgttaggaatggggttgtggggcccgatgacggtgcacgcggcgacgaacttggtacggtggccagcggtgcaaagcttagcgccccggaattgtgaacttgaatcgaaacaaacgcgcttatatcaattaaatcgtgcaacgatgcaattaacgccacgtgggacggcccggacgactagtcactggcaacgggttggtcaggtgatggtgacacaaaacaagcggttagtgacttattggcaggtgcgtcacgggactgctgggcgactgagttgggcgttggcggacaccgtacgggttgtcggaaccagggtcactgatattaagacgcccacgcggcaaccgatgcgcgtggtgacaacggatcaacaggaacacggggtgacgcgcgcggccaataagctgagttatttgcccttaaaaggggcgggacggtacaccactgagcatattttgtttcgtcctaccgccgcgtatctagcgactcaagggctacaaaatcagccagacacgttgcgccagagtagtggctatcgcgaccattatcatttcaaaacagcactgtatttaccgcaacagttagggagccgcttgttgaatgacccacagagtgcgacgttttcagctgacaatcggtacttgtacgtcatgtacgtcaatgatcaacagttgggtggcgccgaccagactggctgggtcgttcgctatgattggcaacgcctgatggctttaggggctgggcaatcagggaagatggcgatggtccgagtagcagcagctcaccaattcgacgggaagatgacggcttttgaccgtcgggtgctggccgccattgaagtggggccggagtttacggcgggatacgttcagtcactagctttaaatcctaagacgaacgagctgtggtttatttcatcgacggcacgtgatcagcttgcaagtgttgcgcgactaaatccgcaatccctgacgccggatcttaaaattgcctttactactggtagcgggcgtctaggtgatgaactgacttttgatcgcgctgggcaggcctattattggacgcatgcgagtcagctcagaaatggcaatgtcacgctttatcgtggcacaatcagttcgacgactggtgtacattttgaacaactcgcgcaggggttagctaataatccgggtttcttcgctcaatcgattggatataacgaggttactggtcggctctacctggtctccgatgagagtattacgtcacttccagcggctaaactgggacacttgacgactagtcaggtcggtgaggcgaactttgctggtgatcgcgagtttgaagggttagtcttcatgcaccacagccaggaaggtttcttgctgacgaatcggggcatcgagttgatgcgcataattgttgataagtagatattaaaatgcaccactcgctagattagattgaagctagcgagtggcgcattttagcatggttcgcgttaatcgaacaaaagtcttgtttaagcaaacggtggatctaatttcgttaaataacggcccggcaagtaaccttgatcttgcaggcgataccagacgaccccgttgtcgtcggccattcgctcaatcaaattgaccgtgtcaccatgagtgacggtagttaaatagcggccatatggttcgatgtatgtgtggacctgtttgccagggacaaaactgacgacgccggtttggcgaacaggccgtttattttggacgcggtagccggctggcaacttgagtaacagtgtgtcaccggtagttaattggaggtgcgtctccggaatccactgatcatcgccaatcgcataccaggtctcgtgagtgactaagcgaacgcgcatgtacgttttataagtgctaccgggctggagcttagttaaatagttggtcgtagttgccccaggatacggataaacggcggtcaacttgttgacttggacaaaaccagtactgaggtcagtttgttgccaattttgattgcggtagaaaaaaaggaccgtcttggaagtggtcgtgtattccccagtcacgtcgcctacggaacggaggagcttaaaaccggcgacggtcggcgcactgacttcgtaaggggttcctaatttcccccggtacatggtcggccggccaattagttcgcggcggtcaatgtcataggcgtacatccagactggttggccagcttggcgttcgtaagtcaacgtgatgctagcctgtggggtcgtaaaccagcgagtcaagccttcgatatggacgaggtggtagccggtgatgctgacggctggcaagtgaatctcttcgccaatggtgccagcaatcatatcagcagcctgcagttcattgccatcctgatctaggtggtgaacgagaactaatgcttctgtttggttaactgtaggtgctgcggcagtttgtgcggcaatggaacgtggtgcctcagtagcgcttgtggcggcttccgtgctgtttagtgcctgaagcattcctttaagtcggtcaagaaacgacacgtgaccactcctttcattaataaattaattatcactagtataacgcattcacaagggttctggcacgtcttaaataaattgtaaaattcccgctttgtcagtcgtgtatactaatatttaataacagggggcgttaacggatgaatctaaaacaattacaatattttttggccgtggcagaggaaggtcagatgacagcggccgccaaacgcttgcacgtggcgcagccaccactgagctatcagattaagcaattagaacttgaactaggcgtcaccctcttcaatcgcttgcctcagggtgtgactgttactgaagctggcaagctactggtggggtatgcccaacagctcacgcagttgtcggcgactgcggagaacaaggtccgggccctggcacacggcgtgacggggaccattaatctggggacagtttcatcctcggcaggggtcatgccgaatacggcattactaaagtggttagggcaccatcccgatgttcagcttgcgattacggaaggcaatacgtatgagttgttagacgatctgcataaacggttgctagacgtggcggtgttacgaacaccgttcaacgcgcaacatctagtctgtcgttactttcccgcagaacggatggcagcagtcattccgaagcgatattcacggtttgaaaagcggcgccagttacaactaagtgacctcgctacgttaccattgatcaagtaccgtcgttttaatgaattattccacgttgcctttctggaagcgtcggttacgccgacttacatcatgacttgtgatgatgcccgcacggcgatgcactgggctaatcaccaattgggagtggccctggtgccacggtcattggctgaaacctatgacggtggtgacgtgctgattcgatcattggcggatcatcgttttcagactcaactggccctagcaacgaccccggaagccttagcgaccccattagttgccggtttgatggcacaattccagcaagcgcagtcgctagactagtttaatcagtttgatatctaaaaatttaatcgcggttaagggtgaattgctgatttaatcaggttgttaccgattacactagctagaaattgaagtggtgttttcagacgcaaaataagcctaatgactgtcgtactggggatacgctaaccttcatttaataattagatatcaatcggtttaaatggtacactaacaattgaaatttaaagggtgaaggtgaaggaaatgatttattcgttagggctaatgctcggcgttggggtaattgccggaattttcggtgctattttaggtatcggtggtggcatgatcgtcacaccaatcctgacacttggtttgggattagatattaagtatgcgattggggccagtattatcgccgtgattgccacgagttcgggctctaccattgcatatttacgtgatgagatgttgaacttacgcgtcgcgatgtttcttgaaattgcgacgacggtcggggccgtcctcggggcagtgttgacgggggtgcttaatgcaacattcctgtacttcctatttggggcgctgttagttttcacgacgtataatatgattcgtaaattaatgagtaagaacggtgaattaccgtcagtcaaagatgacaagctggcgacacagttgaacttaaatggtacttattatgataaagcattgaataagcaagttgattatcaggttgaaaacgtgccgggtggtttttccatgatgtttggtgctggtttcgccagtggcttgttggggatcgggagtggcgcgttcaaagtgctagccatggatacgattatgcatatgccgcttaaaccgtcatcagcaacttctaacctgatgatgggggtgacggcggcagcgagtgcgatggtctacttctttaatgggtcaatcaaacccggaatcgcggccccattagctatcgggattatcgtcggtgccttaatcggctcacgaatcatgacgcggctcaagccacgcttgattcgcatgatctttgtgcccgtgatgctctatctgggaattcaaatgattgctaaaggattcggggtgaccatctaatggataagcaaaaaacaactaaagcgcaagagatgcacgccgttgaaatgatgattgggtatattctacgaattggcgtcattgtttctgcaatcgtgattattattgggatgcttctgatgttgattcagggcaatggtggttatgcaaatggtatggaaccccatacggtcgctgatattctagccggcattgtggcacttaaaccatatgccgtgattatgttaggtttatttctattgattttaacgccaactttgcgggttgcggtctctatctacgcctttgcagtggaaaaagatcacttatatgtttggattacgacgattgttctcatcatcttgattgttgcttcggttattgggtatctcggtaactaggctagacggagctgattaatcaggttgagtcgtgattaaaatgggcgcacatctaaaatggctaccagcttgtttcgaggttaatgtggaaagaatctaagttggtgtaaattcacgggctggtgtgttttatgccgatgtacgagtacttaactagccaatattgtttaataataagagaatgctgataaaaaatcagcattcttttttatttgtgcacttttagctgttttgactaacgtaaaaaagacctaatatcgtcatttttatcgttatttgaattatttattaagaaaaattgccgattgtgttcacttgataattgaacactgatgtgagaatataattgcttatatatcagtaatttcaggcatgtttatcagtatggataataatcgcaaaatgaaataattaagacgattatgacgaaataatgataaaaattagagtttaggattgattttaatttatttataatatacaattactttaacttttcgagggaaaagcacacacaaactattttaaagttaggggttgggttatatgaatttcaaaacagctgcaaaagtaaccgtcgttgccggcgcatccgtactattcttagctgcttgtggctcaagcaagagttcttcaagttctaagcaaacggccaattggaccgaatcagccgaattaccaacgatggacatttctaagtccaccgatgtggttagttctaacgcgttgaataacaccaatgaagggttataccgtctcggtaagaacgggaaggtcacacccggaattgcgaaatccactaaggttactaatggtgggaagacatatacgttcactttacggaagaacgcaaaatggagtaacggggataaagttactgccaaagactttgtttatggttggcaacggaccgttaatccaaagactgcgtcacaatacgcatacttatattcagggattaagaacgctgacgctatcgtcaatggcaagaagcccgtttctagtttagggatcaaggctgatggcgattacaagttgacggtcactttggataagccaattgcttactttgacaagctgatgggctttgtcaacttcttcccacaaaatgaaaaagtggttaagaagtacggttctaagtatgggacgagcagtaaggccatggtttataacggcccttacaagatgactggttggactgggacaaacttgtcatggaccttgaagaaaaataacgattattgggataagaaagctgttaagatggacagcatcaagtaccaagtcgttaaggatccttcaactggcttgaacttatttaattccaataagctcgactttacgacactttccaacgaacaagttaagaattataagaatgataagaactacttagttcggaagacggcttcaactttctacgttgaatttaatcgtaaggatagcgataagactttagccaaagctttccagaacaagaagattcgtcaggccttgtcattagcaattaaccggaagtcctacgttaataatacgttaggtaacggttcgaccgtttctaaaggttacgtttctgaagacttagctaaaaacccgacaactggtaaggactttacgactgacgctgccgttccttctgcagttgactacaacttaacgaaagctaagaagttgtggaaagaagggatgaaagaaattggtgaaactaagctgaacatcaagcttctttctgacgatactgatggtggtaagaagtctactgaatttattcaaggtgcttgggagaaattacctggtctgaccgttactaaccagaacgtcccattcaagacccgtcttcaacggtcacaaaacgggaacttcgatacggttatctctgcctggaatgctgactttaccgacccaatttccttcttgtcactcttcacgtccgacaactcatacaacaatgggaagtatgacagtgccgcatacgacgatgctgtgaagaaggcggaaggtgccgatgccaataacaagactgcacgttgggctgacatggtcgctgctgaaaagcaattgatgaatgatcaaggggtcatcccaatctatcaacaagcctcagcaacgttgactcggagcaatctgaagggcatcatctacaacactgcgggctcaaactacaacttcaagtacatgtccgtaaaataatgatgtaaatccacagaaaaaagtgtgtgtgctttaactgaatgaatgtgaagcaaaggggtaaggattgacacattgttaatccttaccattttgttttataatgagggatgtcattattttttaagttgattttaatagaatgcgaggaattctcatgagaaagtatcttttaaagcggatattttacttgttcctgacattattcattgtggcgaccgccacgttcttcttaatgaagttaatgcccggaacaccgctgcaaaatgaagctaaattgacccctagcgaaaaggcgtcgatcttggcccaatacgggttggacaaacctgtttggttgcaatacttcatttacattggcgggatcttcaaggggagcttagggttatccttccagttctctgatcaagctgtcagttacctgattggtagccggatgggaccatcgatgcagttaggtggtcaagcgatggtcgtcggaatcgtctttgggattatcctaggggccgttggggccatcaagaaggatacttgggccgaccgtttagcaaccatcttatcaatcttagggatcgcagttccgagtttcgtgttagccatcctgttacaatactacctcggcttaaaggctggttggttccctgttgctggttgggaaggcttcgcttacacgatcttaccaacgttagctttggccgccagtccgctggccgaaacggctcggtttatccgaaccgacatggtggacgtgctgagttcggattatattgagctagctaaagccaaagggttgtcgaagtttggcatcgtgtatcaccatgcgttgcggaacagtttgattccaatggttacgctgattggaccattggccgccgccttgatgacgggttcaatggttgttgaaaatatcttctcagtacctgggattggggaacaattcgttaaatcaattctggttaacgactacccaaccatcatgggtgtgacgattttctattcagcactcctttgcttactattattgttgaccgatattgtctacggaattattgatccgcggattcgtttaaatggaaatggggactagttaatggcagaaaatccaagtagtatcgatattaagcccggcgacttcgagccgttagataaacaagcgggtcctgataatgaacggatcgcagcaccttccttaacgttcggccaagatgtatggcggcgattgaagtctaacaagaccgcttttatcagctttatcgtgttagtattcttattcttagtggcatttggtggacgggcagtctaccatgttgatcctaatgcacagtcgccacggtatgcgaacctccctccgaagattccgggtgttagtatccatggcttgaatggtcacttgactcaatctggtaaggacgttgatgcatatgcggcggccggtgcaaagtctgacgtgcattatcttctcgggactgattatctgggccgggacttactggcgcggattatgtatgggacccggatctcacttgaaattgcgttgattgctactttgattgacctgacgattggggtcggattcgggatactctccggttggaaaggtgggcgcgtcgatttattcatgcaacgtgtgattgaaatcctctcgtccatcccacaattggttatcatggtgttgatggccacggccttcacgaagactgggatggcctcaatcattgcggccatcgcgatcactggttggaccacgatggcccggctgactcgggcacagaccttgcaattgaagaaccaagactttattttggctgcgcggacactgggtgaatcacccgtcaagattgcttggaaacatttgttaccaaacctttcaagtgtcattattattcaaacgatgttcacgattccaagtgcgatcttcttcgaagcgttcttgagttatatcgggattgggatcagttcaccccaagcttcattggggacgttgatctctgatgggcagaagaacttccaattcttgccatatcagatgtggtacccagccatcgtgctgatcatcttgatgctcgcctttaacttgttaggtgacgggatgcgcgatgcgtttgatccaaagtcaaaacgttaggaggacggcagcactatggaaaaaccagaaaatgtgattgaggtccgcaacttggaaatcaatttccatacttatgcgggcgaagttaaagccatccgtgacgttagctttgatttacgtaagggtgaaaccttggcaattgttggtgaatcagggtctggtaagtcagtgacgacacgttcactgatgggcctgttagcacctaatgctgaaattaaacgtgggagcattatgttccacggtgaagatattattaaaaagtccgaaaaagacatgcaacacattcgtggtaaggatattgccatgatcttccaagatccaatgacatcattggacccaacaatgcggattgggatgcagattgcggaacctttgatgaaacataagggtttgaagaaaaaagaagcgatcgcccaagcgctagagatgttgaaattggttgggattactaatcctgaaggccgaatcaatgattatccataccaattctcaggcgggatgcggcaacggattgtgattgcgattgcattggtctgctatcctgaagtcctgattgctgatgaaccaacgactgccttggacgtgacgattcaagcccagattctggacttgatgaaggatttacaaaatcgaattgatacgtcgattatctttatcacccatgacttaggtgtcgtggccggaatggctgatcgggtcgcagtgatgtatgccggtaaaatcgtggaatacgggacagtcgatgagatcttcttcaatccacaacatccttatacctgggggttactcaattcgatgccaaccttggatactgaaagtggctcattatcagcgattccagggaccccaccagatttgttggaaccaccagttggtgacgcctttgcagcgcggagcgattacgcgatgaagattgatacggagaaggaacccccattctttaaggtttctgatacccattacgcggcgacctggttactacatccagatgcccccaaggtaacgccacctgctgaaatcgttcggcgtcagcaaaagtttgcggccatgcaaaaaccgcaagcaccaatttcaaatcccgtagcaaaggagtaagtagacatgcctgatgaacgtaaaaaaattctagaagttcgccatttaaagcagtattttaatgtcggcaaaaaagatgaagtccgggccgttgatgacgtctcctttgacatttatgaaggtgaaacatttgggttagttggtgaatctggttcaggaaagaccacgaccggacgttccatcattcacttatatgaaccaactgatggtgaaatcatttttgacggtaaggacgtttccaaattacacactaagaaggaacgccatgaatttcgccgggagatccaaatgattttccaggacccatacgcctcattgaatccacgaatgaaagtcaaggatatcgtggcggaagggattgatattcacggtttagccaaggatgatgcagaccgaaccaagcaagttgaagacttattggagacggttggtcttaacaaggaccactctagtcgttatccacatgaattttcaggtggtcaacgtcaacggatcgggattgcccgggcgttagcggtagagcctaaattcatcattgctgatgaaccaatttctgcgctggacgtttcgattcaagcccaagtggttaacttgatgaaggaattacaagttaagcagaacttgacttatttatttattgcgcatgatttgtcaatggttaagtatatcagtgaccggatcggcgttatgcattacggtaagattctggaaattgggcctgcggatgaagtgtataatcatccgttacacaagtacaccgagagtttgatctcggcggtgccggtacctgatccagagtttgaacgtaaccgtaagcaggttccttatgacgaaacgaccgaacatgacggtaagaagcggcgaatggtcgaaattgcaccagggcactttgtccgggcaactgaagacgaaatcccgatatacaccaagcgggctgttgacgcggggttaattacggaattttctgagtaacggctaataaaacagacggcgagtgcgaatactcgacgtctgttttattattcagtagaatatttaattaactgtttagataagtttattaattaataaccattataattaactcatgttaacttgacatataaatttaatatgtaaaaaatattgatggaatcaattgtcaaaaagccgattaaatcggggatagacggctatttttgaccagctaaactgtgaccggtagtcaaagttatttgtgtaaattttgtaattatgcaataataatattgttaataaagtttgttaacaaatataactattcgtcttaataattgattcgcaccatttttaaaaaaatagtgcgaattgattcctgttaaatcaatatttttgatacgattcgtcattgccgctcgataaccgtatccttgacgacctcaattaagtcaacgtttcactcgcaatatttttttaaaaatcatgcgaagggacaatggcttgttttgaacggttaatgaaaaaagtacaaatttcaggaaggatgctgttagtatgcaacaaccaattaattatattatgaatatcatgcaccttgaacgggacttaaaacgacttacgtcgaactggtcgtccgccacagggcttagtttgaacgagttacggatcttagtttatgtcgaacaacatcctggtatccagattggtgatgtggcaaatgcgttgaatgtggcgaaagcctcgttggcacaaaatattggcaccttgataacccaaggatggttgaaaagtcaaccaattaaacaagaccggcgtttacgggtcttaacgcttacgaaggctggtcaggatcgaatgaaggatgttgatgcacaattgactaaatcacttgacacgacaccagcaacacagttagcggatcaattatcagctttgcaattataggcagatgtacacgttcacggatattaagtgaagtaatatccttaacgcgggataaaggggagactctttgtcccgcgcttttgttttagcacttaatagtggggagcattataggttaacaattactttgtttagtttactctaggttaagtaatttaaacttaataagattgattgaggtgtaatggagcgtatgcattataatgttgaaccgctaagaacggaccaagaaatcgatgattttttatgggctgtttcacaagcgcgttatggggagcgtaatcgcatgattgttttggttggaattaacacgggattacgaatgagtgatattttacgactgaaggttgggcaagtacgtggcaaagatcgtgttatgatcatggaacaaaaaacgggcaagaagcgctggttgtttttgaaaaacctcaaaacggaattagcccactttacgcggtatcggggggcaaatgaaccgttattctgtagtggtcggggcggagctttaaccgttaatggtgtctatcgagtctttcagacggccggtgagtacctggagcgggatgatattggtacgcacacgttgcgcaagacatttggctatcattattatcaaaagactcgtgacattgccggattgatgatgattttcaatcattcgagcgagcaggtgacaaaacgctatattggcattgagcgtgataatttggaacgacaattatgggactttaaattaggcgtttaattatggcagagacgcgggctattcatagcgactcaatgaggatttgaggtaggcacaaaaaagagccagaagtgtaaacgattgtttacgcttctggctctaaatttaattatcttattcggacttcgtctcagccgccaaaacaatcttgccgtcttcaacttttgcaaccatgttcttaacgtcgccgtggtccaaatagaaatcggcgatgcgatcttcgatttgttcctggataacacgccggagtgggcgagcccccatctgagggttgtaacctagttcaacgagtttttcctcgacaggttctgtgacgtggacgtgtaagccttggttagctaacatgccgttgacatcttcgatcatcaaaccaacaattttcatcaagttttccttagataaagcgttgaattgaatgatgtcatcgaaccggtttaagaattctggcttgaagtagtccgtcaaccggctagtgatatcgtgcgtcttgccttcagcagcggcaccaaaaccgacattagcttcactgtcgccagtcccagcgttggaagtcatgatgatgatcgtatctttgaagctgacagtccgaccttgtgagtcggtcagccggccatcatcgaggatttgcaagaacatgtgcatgacatccggatgagccttttcaacttcgtctagtaagactaggctatatggatgacgacgaacctgttcagttaactgaccggcttcttcatagccgacatagccaggcggtgaaccgatcaacttagccactgaatgtggttccatgtattcactcatgtcaaaccgaatcatggcatcttgagaaccaaacagttccttagcaagttgtttagccaattcagttttaccaaccccggttgggccgacaaacatgaaggaaccaattggccggccagttccgttcagaccgattcgattacgccggatggcccgggcaactgcttcaaccgcttggtcttgaccaataaccgtactcttaaggtcgggtgctaaggtcttcatttgagcctgttccttagcctgcaagtcaccaactggaatacttgtcttttcttcgacaatttgttccatgtccttgactgttacagtggcagtatcgttattaggctggtctgaactttcatcgggcttagctttttctaacttagcaacttgatcgcgatagtaggcggctttttcgtagtcttccttcttcaaggcgtcctgtttctgcttttccgcctcgtcgatcttttcttgaatcgtctttggatcgaccgtcttcaacgtcaagttcttacgtgaaccagcttcatcgagtaaatcgatggccttatcaggtaagaaacgatcttgaatgtaacgatttgacaacttgacggctgccacaatggcatcttgatcgtatttaacgtgatgatagtcttcgtacttcttctgaatgccttcgagaatcttgatagattcttccacgctcggttcgttgaccgtgaccggttggaaccggcgagcgagggcggcatccttttcgatgtcacggtattcgtttaatgtcgtggccccaactaattggaaatcaccacgggcaagggcgggtttcaggacgttcccagcatccataccaccttcagcattaccggcacccatgatttcatggatttcgtcaatgaagaggatgatattcggattgctttgaacttccttcattaattgttgcattcgttgttcaaattgacctcgaataccggtaccttgaacaagggaagccacgtccaaacgaataatttctttatctaacagtttttgtggaacttgaccagaaacgattttctgtgctagtccttccacgaccgccgttttaccaaccccagcttcaccaattaaaacggggttattcttggtccggcgattcaaaatctcgataacccgattaatttcggtatcgcgaccaatcactggatcgattttgccctgtttagcttgcgctgttaagttgaagccgtattggccaaggaggccaccgccgttgttattgccacgacgattgccgccattaggaccagctggctgggtcggtggggtctgttgttgccggtaagcgttattaggatcaacgccaccctgcattgcacggaaaatgtcgtcaagaccaccaaaaccgaatggatcttgtgccatatcagcacctccaactccgttatttggttgctgttcctgattctttagcagttgatagcaattttgacaaaggttgatttgtcgccgctgaccgttgacgctcgtatataaatggatcgtcgcttcgttcttatggcaattgtcacaaagcattatgctgtcacacacctttcgcatcagaaatataactaaatcgattaggatcatagttaaaggttcatcggctctttgacctttgttgacctttgactattagtatagcgaatttacggactgttgcaagtgaaaagcctcagggtcaaaactggacgtgcggccaggataattcgcaatggctgattgattcaattatttctgaatagtctggatagtcgcaactcatagcttgtcatgtaaccggattcgttgtatattaattatctggttaggataagtgatgatgtaactgtctgtctatattatagtacaaagcggtttttttgcatgtatcgagcctgaccagttttgatgtttgcagcgcatcgtttttcattggtgaccgtcaacagccagtgagcggcggagaactttgttcgtaaatatcagaataatgatgcagtaatgtgtcaacctaactttgaggaggcggtaattgtttggcaacggattatacccagttaatggaagcgttgcgtcatggcgaacgcgacagttttaccgtaacgccggatgaatttatggcttttcacgacgcctatatgaagtatgagtatcgtaaacgagtcattggtacggcggacttagatggccgcattgtttaccatttcgagaaggatggtaagacaaccaattaataggcctagcttgaatgaaagggcttgtattttaattggataattgctatcatcattattaagggctcttgagtatacgtgttggcggcaactcgaattgactcggaaccaattttaaatttatttatcttgaaggagatcgaatagttatggaaaagaaagaatttcacgttatcgcagacactggtatccacgcacgtcccgcaactttattggtacaatcagcaagtaagttcaactcagaaattacgttgcaataccaagacaagtccgttaacttaaagtccatcatgggtgttatgtcactcggtgttggtaaagacgctgacgttaccatttctgctgaaggtgccgacgaagccgacgctatcgcagctttaactgaaacgatgaagaaagaaggattatctgaataatggctgaaaaggtactaaaaggaattgcggccagtgatggtgttgcaattgctaaggcctatatgctagttgatccagatttatcattcgaaaagacaacagtttccgatacggatactgaagttgcacggttacatgacgctttcgatgcttccaaggctgaactaaaggtcattaaagacaaagcggttgaaaacttgggtgaagaagaagcagaagtttttgaagctcatatcaccattttgtctgacccagaaatgctcggacaaattgaaggtaagatcaaggatgataaagtcaatgctgaagaagctttgaaggaagttactgatactttcatttcaatgtttgaagcgatgacggataatgcatatatgcaagaacgagccggtgatattcgcgacgtaacgaagcgggtcttaagccacttgttaggggtaaccttaccaagtccagctttaattgactccgaagtaatcgtggttgcccacgatttaacacctagtgatacagctcaacttgatcgtaagtatgttaagggcttcattactgacattggtggtcggactagtcattcagccatcatgtcacggacgcttgaaattccagcggtcgttggatctgaatctgccacgactgatatcaaagaaggcgatacggtcgtcttggatggtatcaacggtgacgctttagtagccccaacggatgctgaagttgctgattaccaacaaaaggctaaagactttgttgcgcaaaaggctgaatgggctaagttgaagaacgaggccaccgtttctaaggacggcaagcactttgaattagcttctaacatcgggacacctgacgatatggatggggttttggatgctggctctgaagccattggattattccgttcagaattcttgtacatgaacagttcagaattacctgacgaagatacccaattcgaagcttacaagaaggttgtcgaagggatgaacggcaaacccgttattgttcggaccatggatatcggtggtgacaaggaattaccttacttgccattacctgatgaaatgaacccattcttgggttatcgggctattcggatttccctcgatcgtgatgacatcttccggacccagttacgtgcgttattacgtgcgtcacattacggtcaattacggattatgttcccaatgattgcaacgcttgacgaattccgtaaagccaaagctatctttgaggaagaaaaagccaagttggttgcagctggtacgcctgttgctgacgacatcaagcttggtatcatgattgaaatcccagcggcagctattttagctgaccagtttgctaaggaagtcgacttctttagtattgggactaacgacttgattcaatactcatttgctgctgatcgtggtaacgaacaagtgtcatacttgtatcaaccatacaacccatcgttgttgcgtttgatcaagcatgttattgacgctgctcacgcgaacggccgcttcacgggtatgtgtggtgaagttgctggggatcagattgcggtgccattattgatgggcttaggtttggatgaattctcaatgagttcaacttccgtgcttaagacacgttcattaatgaagaaacttgatactaaggaaatggctaaattagctgataaggcacttaacgagtgtgttactaacgaagaagtcaaagaattagttgaaaagaacgtcttcggtaaataaacaatcaaactaagagcaaatctgcggatttgctctttttttggggtctctgtcaaccggtgttgatgaagttatatttagaatccaattcatttacgaattgggttctttttttcgattttgattttgaactcaatttgaattcgataaataaagttttgccagttcttgtaaccatacgcggttcttttgatttgcttgattttacggttcacaccttcgacgggaccatttgataatcggccggtagtcatatttttgatgagttgccggttcttgataaagcttttaatattggtcattagctgaggactgacattttcgacatgacctagtgctgctttgaaggatcgataatcacgcttttgaaaagccttaactaaggcatgtgcggcttggtaggtttgtcgaaactgttggtctagatttaaaccggctacgactaattgctctggtgtcatgcgatctttaagatgcgtaaaccattgaggtttgcgcttttcgaggctgtcataatcttttaaatataaccgccaataatatttaagcactcggtattcacgactcttagggttaaagcgtttcatgagttggacccgagtttgattcaaagatcgtaaggccatttgaacaagatgaaagttatctgcgactagtttggcgtgtggaaagagtgttcgaatcgcgggttgatattgagaattaaagtccatcacaacccgggttacgcggtcacgatgacgtttagaataatgattgagaaagaagtctttaatatcggcattcttacgtcctggtaaaattgtaatgatgtcgtgggtttgggcatccaccgcaataaaactcatttgtttaccagttgaacgaaattcgtcgatacaaagcatcgttggtagtccgttgaaagctggttgggtaccttgtccgagtaactttattcggcgactaatcgtattggtcgagacattgtattgagccgcaatactagccatcgtacggtcttcagttaatgatagatcaatggcatgcagactgttttcagatatttgatgatgttttttaaccagcgtagtcgttgttaaactacttttaccacaatttttacagataaatcgctgcttctttaagttaaggatggtgactcgttcgctaattctaggaattctgatgtgaacggtcttaaagccattcttaaccatggaacgtttgccacaacgtgcgcaaacagtaaccggatacgttagctttgcaagcacttgtaagcttccgttagtagctttttgaacaactaaatcagtaatatttgggtctttaatttggagcagtactttagtagaatggtcctgggacatatctgacactcgctttcaattggttttggtcgacttgattgtagcacaggacgatatgtccttttgttgtacataaaaatagtgttgatggattttatccatcaacactaaatatcatagaccctttttttgtgggtaaatgcgggtcattaaccagttggtactagccccgggtttagcacgacgggggagtggactacccgcaccggtatgatgagagctggcacagtgcatgacgcgaattgactggacatttaggcattgtgacaattgtccatagttgcgaccgcgctagtcaatgatggacacagggcacattgctactcgctgttgacggtgaagagttggtgtagtggaaacgatgtaatggcggtgttgagtgatgcctagcgattacaattcatcatttcgaattcattttctataggtgtagctggtcagatagattttgtcatgaactcttaatttatattaagattatttgcaactcggatatttaaccaatataatgtttataatataggcattaagtcgaattcgtgatgatcatgaaataatgatctaagcgcggttaagcaacatcgattagcagcacggttaattgatggaaataaggggagaatctacgtgaatatcgggatatttacagacacatactatccacaagtgagtggggtcgcaacgtcaatcaaggtgttacgcaatcaactcgaacgggctggtcatcaagtctatatctttacgaccacggatccccatgttgataagaatatttatgaacgcaatatttttcggtttacgagtattccatttgtttcgttcacggatcggcgcatcgccgttcgcgggctttttaaggcttaccaggttgctaaggatcttggcctggatattgttcatacgcagacagaattctccatggggatgattggtaagtttgttgccaaacaattaaaagtcccatgtatccatacgtaccacacgatgtatgaggattatctacattatattgcgaatggtaagttgttaaagccataccacgttaaggaggccacacgggcgtattgttatcatctgaacgggattgtagcaccaagtgagcgggttgcaaatacactgacgggctacggcgttaaagcgccaattcgcattattccgactggaatcgacattaatcagtacgagcagcagtcgacggtggattatcggcaaagactcggctatcagtctgatacgccagtattactttccttgagtcgtttggcctacgagaaaaacattcacgaagtcattgcagccctaccggcgatcttagaacaggtgccgaatgcccaactcctgattgtaggtgatggtccggcacgtgaaacactggaaaatcaggttcaagacgccggcttaacggcgcacgtacaatttaccggtgaaattgataatgatgaagtttataactattaccagatggctgacctgttcgtttcggcttcgaactcagaatcacaggggctgacgtacattgaagcaatggctgcgggccttaaaacggtagtggctgctagtccgtacacggatcaattacttgatgatccgtcactggggacgacctttacaagtgagaccgatctgatcaaggatgttgtgcgttatttacaacatcccaatacttttaacgatcccaagccacggcagaagaagctttaccaaatttccgcagagtatttcggcaagcaagtgatcaactactatcaagacgtacagctggcgtattctgaatcagcggataaatcggcgaatattagtaattaacgtgtgtcaaatcgtcaatgagcaccgccaaaccggggatgcttattcgacgtatgacgcgtaaggggacgaattatgttagacattaccatgttttcaaaagctgactccgtcaagggtcagggagtcggcagcgcctatttagaattgatgcggttgttgcggacccattggcaggatgaatttaatattaaagtcaatcgatatgggcgctccgccgtttcacattaccatacggttaatccaatgttttacctgtctacgtttatgcctaatcgaggccgtaaaatcggttacgtgcatttcttaccagagacgctcgagggtagcttgaagttgccacgaccattccaaatgattttcaatcgttatttaatctcattttataagcggatggaccacattgtggtggtgaacccgactttcattccaaaattggaagcataccatatcaaaagagcagatgtaacgtatattccgaattttgtcagcaaacgtgaattttacgaaatgactaaggctaaacagttgcgcttgcgccaacaatacggctatgatcaaaataaattcatgattatcgggaccggtcagattcaggatcggaaaggtgttcctgattttattacgcttgcaaagcagaatccagatatccagtttgtatgggccggtgggttctcgtttggccgaattacggatggttatcaggagttgaagcaggtggtggataacccgccagctaatctgtcgtttccaggcatcgttcctcgtgagaaattggtggactattataatatggcggatcttttcttactgccttcttataacgagttatttccgatgtccgtgttggaagccttcagttgtgggacaccagtattgctccgggatttagatttgtaccgggcaatcattgatggctactatcaagcagccagtgatgttgatgatatgcaacgacagatcgaccagttacgccataatccagccgggttgcaattcttgcatgacaaggcggttttggctgctcaggattattcggaagagcgccttgccaaagtttggcatgatttttatttgcaacaggcaaaagaggggtagtcaatgacaagaaaaaatatctggtcattactcgtaatggttgcgttaggcgtcggcatttcgtggtactcactgcgcaatgtcaaactaagcaatctaatggacgatattctcactttgaattggtggtggttattagttgcgttagggtgtgtcggactatacttcggtctggaagccgtggtggtgcaaaagtttgtcaggcaccgttatcggaactatcgctttaagagtgccctgcgcgttcctttagccgagcaactattcaacggtatcaccccgttttcttcgggtggccaacctgcccaaatcttcgtgatggcacaatcagggattgacgctgggcgggcaagttcagttgcattgatgaagtttgttgtttttcaggccatggtggtattgaatttcttattcgccatgttaattggttttcattacttagctgaaaagttaagttacctgtcactatacgttttgttaggttttctgattcactttgcggtgattgttggtctgttgctggtgatgtactggtataactttacaaaacgagcggtgaagatcgtcttgatcccggtcagctggtttatgaaagctgagcgatttgccaagttcgaaaacaatattagtgaaaaaatcgattcgttctacgaagaaagcgttcgaatgaccaaggactggcggatgctggtcgaagtttgtatcgtcaccttcttacagctactgttttactacctgattccgtattttattatgcgggcaatgggaatcgatgatgttaatttgattatggtgactagtttgaacgtgttgatcttcttagtgacatcactattcccgattccaggtggggccggtggtgctgaatttggtttcacggcgttgtttgctaagttcattcccagccacagtaagctgattttagcgatgctgatctggcggatcttaacgtattatttaggactattcttagggatgatcgccatggcgatgcggcctgaaaaagcagaagaaattccgattgcggcacctagccggtcggattcacatgaacagtaattttaatgggccgacatcattgttcgacccatttttcgcggttacgaattaaaggaaggtactatgttaaagttaatcaaacaacggttggtatggggactagtgttgacagcgacagtcagcggggtgttgagctgcaatgtagcggcacacgcgaccagtagtaaggcggatgaggtcaaagccgcctacgtgatggatgccaagtctggtcaggtcgtttatgcgcagaatgccgatcagaaattaccaattgcgtccttgagtaagctcatgacgctgtatttagttgaacgggccatcgagcatggtcagatcaagtggacggatgcagtcccaattcgcaaaaatgtccgtaagatggcaaccagtgcaactttatccgtaatgccgatgcccgccaaggagacgtttacggttagggagttattcgcagctaccttggtagggtcttcgaatagtggtgccattgcgctgggggagtatgttgctggcagtaatgataagttcattaaattaatgaatcaacaagcgtccaaatggcatttggatgcgagttttattagcgcttcgggacttgataatactgatttgaaaaattacgatttaaaaattaagggaaccagcgatcaggaccaaaatctggtgtcagcaagggctgtgacgaccattgcacaacatttgattgatgcttaccccgatgttattcaagttgctaatcaacgttcagtcaaaattcataagtatacggtcccaacttcggtggagatcctgaagggcgccgagtactatgatccccgcgtgccagtcgatggactgaagaccggttatacgaatcaggccggtgcttgcttagtcgctacataccggcagaacggccaccggatgattgcaacaacacttggcggtgcgtggcagtttacggcgaacaacaacttgcggctgatgctcaaaacgaccgagcagtataaacaggttgtacctaagagcatcaattatcagattccggggacgcagaccaaagtgcgtctggtgacgaagtacaattcaaaactgtgggtgaatagtaagcagccaatgacgcagaccaaaattgctttgtggccattacatcggacagcgccaaattatctggctgctaatacggccgttcttaaattgcgattgacggatccattgtcaggaacgacgaaggaagtcatttatcggacgcctgaagcgctgacgatgcttggaccacttcaatgggcaacagcgcccgcaaaacggaccaccacgggcacgtatgcgttcgcaaagtgatgctcgcttaatagatcgtgtgatgctgaagacaaataaaggtgcgccaactatcgtaatttacgagtagttggcgtacctttttgagttgaatccaattcagtcattgaaatgactaacagtgatgaactaggatagttagccggtggactgtcgttgtttagttgatacggttagcaggttcctgcatatatgcagtgaggcgatccatggcctggtggagcttttccatgctagcagcgtaacttagacgcacgtagccttccccctcggcaccaaaaccagtccctggaataatcgcgagctgattcttgcgtgctaagtctttacagaatgccatcgagtcttgttcaaagccagctggaattttcgcgaagatataaaaggctccggtaggacgtgcgattttgaaaccgagcttcgacatcgtttgataaacgaaatcacgccgagcttggtattcttgccgcattggttgcgcatcatcgattccgttggtgagggcttcaacaccagccttctgagcaatcgtggttgctgcagtgacgtagtattggtggacttttttaagttgggccgtcatttccttagaggcaaacaggaagccgattcgccagccagtcatggcatgagacttcgataagccattgatcaggatcacttcgtcaggaatgaatttagcaattgagacgtggtcgctaccgtaagtcagttcactgtaaatttcatcggatacgacccacaagttatggcgatggaaacagtcggcgagcgctttgatttcatcttcaacataggtgacaccagtggggttattcgggtagtttaacacgattcccttgaagttctcgtcaggatgagcagcaataaaatcgtcgaccatcttaggcgtaatgacaaaatcgttaacgcctgtatccatgaagaggggcttggcgtgtgcttcttgaatgatggggatgtacgctggaaagattggggatggaatgataatggcgtcgccaggattacagatcgtcgttaatgcagttgcgatagcttcagtcgctcccacggtcactaagacttggtcttcagcatcatagtggacgccgtactttgtctcttgaaagtgggcggccgcttggcgtagctccaacagacctgccatgccagtatagtgggagtagttgtcatcaatcgcctttttagcagccgctttaacgtgctcaggcgtgttgaaatcgggttcaccgagcgttaacttgaccatatcaggtatcgcactaacttcttcgtcaaactggcggatggttgaaacttgaatgtgactgatggtttcattgagatcgtctctaaatagtgtcatatatccgaactcctttaatttataagttgttctaattttagcacaacttctcaccgtcttagcaggaagttagggtataattataagtgtgaaaatttgtggtaaaaatgggctttctactaaaaaaacgtgttattagtcctattttttgctagaatgtaaacaaaacttgaaggagcgagattagtataatggataaatctgaactatcagcaattctcaaacgactagaagccatgcgcacaactgaagcaaccgaagtgcaatcacggcggttcgaaaaggaaggcgttcaacgtgggcaagtagcgtatgatcccgctacctcgacgtacacgttacaagaattcaatccagaccaaacgtttgaatttgataacattgacctcgtggcaattgaattatacgatttgctaacggataactagattcccccaaaatccagatagattttcgatagatccatattatgacgcgttgtaatgttgaagaatttttgaagaaatcttcaagatattgctaactagtacgcaaccgttataatatggatttgttaatagcaataacggaggaagaaattaccatgcctaaatttataaaaaacacggttgggaaggtcaacacaacgttgggcttttacctcctaaccgtggtcttattttggctaaagacatatatcgcttataagagcgagtttactttaggggttaagggacccgttcaggaatttatcttgttcttgaatccatttccgacagcgatcgtgctgctcggtattgccctatatttccgtggtcgcttaaagtattggattatgatgatcattgacgccctacagacgacgtggttatttgccaatatcttgtattaccgggaattctctgatttcatgtcggcgggggtaattaagagttccggtgctgctagtaataacctcggaaagagtttgggacagatcattcatggaaccgacttcctagtttatgcagatgtcgtgttgctgattctgttattagccttcaaggtcattcggatcgatccacggcctttcaaaattcggtatgctgcaacactgaccatgattggggtggcgttgtttgctgttgacctcggaatgtctgaacatgaccgttcagatttattgacgcggacttttgataacaactacatcgttaagtacttgggactcaacacatatgcagggtatagcttctatcagaccgaaaaggaaagtgcgacgcgcgcccaagcaagtagtagtgatatgaagagtgtgctagcctacctcaagaaaaaccaggctggcgagaacgtcaaatactttggtaaagcgaagggcaagaacgtcttcgtgattcatttggaaagtttccagcaatttttaattgattataaggtcgatggtaaggaagttaccccgaacctgaacaagttctatcatgataagagtactttgagttttgataatttctaccatcaagtggcgcaagggaagacctctgatgctgaaatgatgatggaaaactccttgtttggtttaccaaccgggtcagcgatgacgcagtatgggacgtcgaatacgttccaggcagcgccagcaatcctgtcacaaaagggctatacgactgcggctttccacggtgatgtggctagtttctggaatcgggataacgcgtataagtcgtgggggtataactacttcttctactcttcttactataaagagaagtcagactacaatattggttatggcttgaaggataaaatcttcttcaaagactctgttaagtatttggagcaattaccacaaccattctacgcaaagctgattacgttgacgaaccactatccatacgaattggataagaagaaccagtcgatcgataagacgacgaccggggattcaaccgttgatggctacgttcaaacgtcccattatcttgatcaagcctttgccgaattcattagttacttgaagaaggccggcttatataagaatagtatgattgtgctttatggagatcattatgggatttcaaacaaccataaggctgccattgcacagttattgggtaaaaagtcggtaacgagtttcgacttggctcaattccagaaagtaccatttatgattcattctgaaggaatcaagggtggtattaaccacacgtatggtggtgaaattgatgcgttgccaacgatttttgacctgttagggatcaagaacaagggttacatccagttcggaacggacttactgtcgaaacagcataaccagacagtggctttccggaacggggattttgtctcaccgacatatacgaagatcagtgggacagtctatgattcgaagaccggtaagaagctaacggatatgacgacgaagcagaaggatactgtcaaacagatgcaaaatcatgtgacgacggaactctcactctctgatcgggtcatccagggtgacttactacggttctacacgcctaagggctttaagaaggtcaataagtcggactatagttataagctgactaagaccctcaaatcattgaaagagatccaagctgagaagaagacgagtgttctctcgaagcataagggcaaatcaacggagagtctgtataagacggatgcaccagaactgtctagctcaagtgacagtagtagtagttcaagcagtagttctgattaatcgaactcgtatcaactaagggataacgctgacggcgttatccctttttggttgcggaaataagctgccacttgttttgaccacagcgcggtacactattattaagccgattgttgcgcagtgtgaattgacactgatggtgaacgatgaagtattaccaattttggagtcccaagtaaatgcaaagttggaatggtaggcgcgtcgcggatgttgtgaaccgataaagtacggtgatgaggtgggaaatgctgactgattggttgtcttgatttggtagattgtcagcgaaataatattcattatgctagcgttggtttactttgaaaaacagtcgttgaaaattaaagggagatttattgaacttttgcttgctatcttaataaaaaccccgtaaaatatagtctattgcgacattaatcggtgtttaaaacttttctgagattaattcataaaaagggttgacccgggtcgttattcttggtattatatttcttgtcgttaagagcgatatgcaacattactcattattatgaatattcaaattgatgtgagcatttacattgaatagttattcaaaataatttataaaaagatgttgacagcttgttctgatgatgataaactttaatagttgcgttgaggtaatcaacgaacgatttagacctttgaaaactgaacaaagtttcgacgaatcaaatgtgtagggtctcttgattttgaatcaagagcaaaacatttgcgaagtcaattcgctagcaaataaattttagtacaacattaaatgagctttttagaactcatcattaatttgagagtttgatcctggctcaggacgaacgctggcggcgtgcctaatacatgcaagtcgaacgaactctggtattgattggtgcttgcatcacgatttacatttgagtgagtggcgaactggtgagtaacacgtgggaaacctgcccagaagcgggggataacacctggaaacagatgctaataccgcataacaacttggaccgcatggtccgagcttgaaagatggcttcggctatcacttttggatggtcccgcggcgtattagctagatggtggggtaacggctcaccatggcaatgatacgtagccgacctgagagggtaatcggccacattgggactgagacacggcccaaactcctacgggaggcagcagtagggaatcttccacaatggacgaaagtctgatggagcaacgccgcgtgagtgaagaagggtttcggctcgtaaaactctgttgttaaagaagaacatatctgagagtaactgttcaggtattgacggtatttaaccagaaagccacggctaactacgtgccagcagccgcggtaatacgtaggtggcaagcgttgtccggatttattgggcgtaaagcgagcgcaggcggttttttaagtctgatgtgaaagccttcggctcaaccgaagaagtgcatcggaaactgggagacttgagtgcagaagaggacagtggaactccatgtgtagcggtgaaatgcgtagatatatggaagaacaccagtggcgaaggcggctgtctggtctgtaactgacgctgaggctcgaaagtatgggtagcaaacaggattagataccctggtagtccataccgtaaacgatgaatgctaagtgttggagggtttccgcccttcagtgctgcagctaacgcattaagcattccgcctggggagtacggccgcaaggctgaaactcaaaggaattgacgggggcccgcacaagcggtggagcatgtggtttaattcgaagctacgcgaagaaccttaccaggtcttgacatactatgcaaatctaagagattagacgttcccttcggggacatggatacaggtggtgcatggttgtcgtcagctcgtgtcgtgagatgttgggttaagtcccgcaacgagcgcaacccttattatcagttgccagcattaagttgggcactctggtgagactgccggtgacaaaccggaggaaggtggggatgacgtcaaatcatcatgccccttatgacctgggctacacacgtgctacaatggatggtacaacgagttgcgaactcgcgagagtaagctaatctcttaaagccattctcagttcggattgtaggctgcaactcgcctacatgaagtcggaatcgctagtaatcgcggatcagcatgccgcggtgaatacgttcccgggccttgtacacaccgcccgtcacaccatgagagtttgtaacacccaaagtcggtggggtaaccttttaggaaccagccgcctaaggtgggacagatgattagggtgaagtcgtaacaaggtagccgtaggagaacctgcggctggatcacctcctttctaaggaatattacggaaacctacacattcttcgaaactttgtttagttttgagaggtctaactctcaatttaataagcgttttttgggcctatagctcagctggtttagagcgcacgcctgataagcgtgaggtcgatggttcaagtccatttaggcccattggaaccgaaccagttggttccataagttgaatacctcatggggaattagctcagctgggagagcacctgctttgcaagcagggggtcagcggttcgatcccgctattctccattgacgacgttggtcgtcattgaaacttgttctttgaaaactagataatatcaaatatattttttcataatgaaaccgagaacaccgcgttttttgagttttttattgaagtttaattatcgctaaactcattaatcgcatttaccgttaggtaaatgaggttaagttaacaagggcgcatggtgaatgccttggcactaggagccgatgaaggacgggactaacaccgatatgcttcggggagctgtacgtaagctatgatccggagatttccgaatggggcaacccagcagttttaatcaactgttaccactagatgaattcatagtctagttggaggtaaacgctgtgaactgaaacatctcattagcagcaggaatataaagaaatttcgattccctaagtagcggcgagcgaacggggaacagcccaaaccaaagtgcttgcactttggggttgtaggactgaacatttgagttaccaaagaacttgatagtcgaaggatttgggaaaatccgccatagatggtgatagcccagtagattaaatcaaattctctcagttcaggatcctgagtacggcggaacacgtgaaattccgtcggaatccgggaggaccatctcccaaggctaaatactacctagtgaccgatagtgaaccagtaccgtgagggaaaggtgaaaagcaccccgggaggggagtgaaatagttcctgaaaccatgtgcctacaataagtcagagcgcgttaatgcgtgatggcgtgccttttgtagaatgaaccggcgagttatgatcccgtgcaaggttaagactaaaaagtcggagccgtagcgaaagcgagtctgaaatgggcgttttgagtacgaggttatagacccgaaaccaggtgacctatccatgtccaggttgaaggtgcggtaaaacgcactggaggaccgaacccgtgtaagttgaaaattgctgggatgaggtgtggatagcggtgaaattccaaacgaacttggagatagctggttctctccgaaatagctttagggctagcctcggaattaggatcatggaggtagagcactatttggactaggggcccgtcttgggttactgaattcagataaactccgaatgccattgattcatatccgggagtcagacgatgagtgataagatccaccgtcgaaaggggaacagcccagaccatcagttaaggtccctaaatgtatgctaagtggaaaaggatgtggagttgcatagacaactaggatgttggctcagaagcagccaccatttaaagagtgcgtaatagctcactagtcgagtgatcctgcgccgaaaatgtaccggggctaagcatactaccgaaaccatggatgcgaccattaggtcgcgtgataggagagcgttctaagggcggtgaagcaagatcgtgaggacttgtggagcgcttagaagtgagaatgccggtatgagtagcgaaagataggtgagaatcctatccaccgaatgactaaggtttcctggggaaggctcgtcctcccagggttagtcgggacctaagtcgaggccgagaggcgtagacgatggataacaggttgagattcctgtactagttaagtgcgtttgagcaatggagggacgcaggaggctaagatgtgcattctgttggattagaatgtccaagcagtaagtcttgtgaagagtcaaatgcttttcactttaaggacaagctgtgatggggagcgaaatttagtagcgaagcgtctgatgtcacactgccgagaaaagcttctagtgagtacttaactacccgtaccgtaaaccgacacaggtagtcgaggagagaatcctaaggtgagcgagtgaactctcgttaaggaactcggcaaaatgaccccgtaacttcgggagaaggggtgctgatcgcaagatcagccgcagtgaataggcccaggcgactgtttatcaaaaacacaggtctctgcaaaatcgtaagatgacgtataggggctgacgcctgcccggtgctggaaggttaaaaggatgggttagcttcggcgaagctcagaattgaagccccagtaaacggcggccgtaactataacggtcctaaggtagcgaaattccttgtcgggtaagttccgacccgcacgaaaggcgtaacgatctgggcactgtctcaacgagagactcggtgaaattatattgtccgtgaagatgcggactacccgcgacaggacggaaagaccccatggagctttactgtagcttgatattgagtgtttgtacagcttgtacaggataggtaggagccatagaaaccggaacgctagtttcggtggaggcgttggtgggatactaccctcgctgtatgaccactctaacccgcaccactaatcgtggtgggagacagtgtcaggtgggcagtttgactggggcggtcgcctcctaaaaagtaacggaggcgcccaaaggttccctcagaatggttggaaatcattcgcagagtgtaaaggcacaagggagcttgactgcgagacagacaggtcgagcagggacgaaagtcgggcttagtgatccggtggtaccgtatggaagggccatcgctcaacggataaaagctaccctggggataacaggcttatctcccccaagagtccacatcgacggggaggtttggcacctcgatgtcggctcatcgcatcctggggctgtagtcggtcccaagggttgggctgttcgcccattaaagcggtacgcgagctgggttcagaacgtcgtgagacagttcggtccctatccgtcgcgggcgtaggaaatttgagaggacctgtccttagtacgagaggaccgggatggacatacctctggtgtaccagttgtgccgccaggcgcatcgctgggtagctacgtatggatgtgataaacgctgaaagcatctaagtgtgaaacacacctcgagatgagatttcccattcctttatggaagtaagacccctgaaagatgatcaggtagataggttagaagtggcagtgcggtgacgcatgaagcggactaatactaatcggtcgaggacttaaccaagtaattggtgttccggttcatatgaagatatttgatattgtctagttttgagagcacaagtttctcaatagtgtggtgacgatggcgagaaggatacacctgttcccatgtcgaacacagaagttaagcttcttagcgccgagagtagttgggggatcgctccctgcgagggtaggacgttgccatgcgattattccgacatagctcagttggtagagcgcttgactgttaatcaagatgtcgacggttcgagcccgcctgtcggagttatctacggtaagccatggagagttgtccgagtggctgaaggagcagcattggaaatgctgtaaacgggttatacctgtttcaagggttcgaatcccttactctccgttagttagatataataaatatgaccccttggtcaagtggtttaagacactgccctttcacggcagtaacatgggttcgaatcccgtaggggtcattatggaggattagctcagttgggagagcgtctgccttacaagcagagggtcacaggttcgagccctgtatcctccatctgatgagagttactcatcaataatttaatagactccatcatgaagaatgatatggctcggtagctcagtcggtagagcaatggattgaagctccatgtgtcggcggttcgattccgtcccgcgccatttatggaggggtagcgaagtctggctaaacgcggcggactgtaaatccgctccttcgggttcggtggttcgaatccactcccctccattctttatagggatatagtttaatggtagaacaacggtctccaaaaccgtcggtgtgggttcaactcctactatccctgccatgatggcggtagtggcgaagtggttaacgcaccggattgtggctccggcacgcgtgggttcgattcccacctaccgccctttgattgggttatagccaagtggtaaggcaatggactttgactccatcatgcgctggttcgaatccagctaacccagttgggtttgggcaataaatgatggcggtatagccaagtggtaaggcagaggtctgcaaaaccttcatcaccggttcaaatccggttaccgcctttcctgaaaaggttataatcctgatcagatttatgttccatctagttattattttgccggcgtggcggaattggcagacgcgctggactcaaaatccagttcccgttgagggagtatcggttcgaccccgatcgccggtactaagaggttttcaggaagctctaagtacctttaagaagtcgttatatcgttgatataacggcttttttgtattcttagaatcatgcgaaaataggcaaaatgatttttgggtgaactttccaattgcaaagaataaatttacaatattagcattgcatgaatatgaacgtagaaatagtctcgtaagcatcgaaaagccctgtattagcataaatcatgctaacatagggcttttcatattatggtaggtctttaaaacgaatccatccatctaaaacttgctcgttgcactcggtgataactgaagtagttggtttaagtccatggtgcttgttctgctttgtgactcgctagtgagttgtaatgtgtttctgaaccgcagctagtcaaataatggtaacggtgccaaaaaatcgatatctgttcgttcgctggcggcgccttctgctaaaattgccatctgcttgaccacttgggcgccagcttggtgtaggagggcgttggcagctgtcaacgagcccccactgctaatgacgtcgtcgataatgataacgcgcttatgattgattagtgcggcgtcagtaccatctaaaactagctgttgtggggtgctggtcgtaattgcgcttaccggttcgataagcgggtgctgcatgtaatccttacgattcttacgtaaaacgataaagcgagggtggtttgtggcctggcttagtgcctgggctagcggaatgcccttactttccatcgtgactaaataatcaaatttagtggtagttagccgttgactgagctgacgggcagcatagtcggtcagctcagcgtcgcccaatagaacgaaagaggcgatgctagtcgtggcatttaatcgaatcaatggtaactgccgtgtcagcgatcctaatgttaactgataagtttgcatatttataaccccaatccaattaatggtaaaccaaattttaggagtgccccggtcattagccccgcgaatggatcgacaagggcggtcacgacgagcgttacgcctgcaaccgtacttaacgagccgtgcaaagcggtggttgcattttccgggaaaatgacaatggtccctaagataaacaaaaaaccggcgattgcagtgctaggcacaacttttcccagctttggcagccatcccagtaatagaatcagcatcatgatcaacatcattaggatacccgcgattactggttcaggcgcgctggctgtcgcggaaataatcgtttctactggcgcaccacccagaaggctagttcccaggtctgctaatgcctgactactagtcagtagatttagattgaccgggttggggtgttgtcccgtcatttggccagtaattaagccgtacgagaggttagcaccgatattaagacaagctagactcagagcacctcgcaggattttaaaactgaactgtggcctgacaaattgtaatttgcgggtcgtcacatgttccggtagtgcgacgcgataatgtgtcgtcgctgcgtaacagctggttccaatcactgaaacggcaattgtccatactaaatctttactgatcaaataagtcacacccgccaagccgattgacagccacccaaattggggttgttcgtgcgccatttgcaacgcgattttagccaacatcaggccaactcctgccatcatcgctgccataagctgattgcccagactatgaacgatgagcggcagagtaccggtcaagccaatcacgaacatcagactcgcacctaaaaagataatcgacgaccgttcgcgtaaatcgtgtcccaggtgcccgactagtgcgagggattccgcttgaaatgaaaccggtgcaactgaactagccacgccgttgattaaaccaactaatccgaatgaaaatgcagtcggaaagaccgcaaaaccgagactcatcgccataattccttgtgggatcccgtttaaaacgaccccgattgctgccaatagatccgccaaccaatgcatattaataccgccttttttgtttatacgaataatatacgactgattagggtttaaatccagcaaatttaggacaaagtcagaataatattgtttgttaactatttatagttcgtgttttcacgaatcacgattagttggcgcacgctcgcaaatggggtatacttagtgctaattagtgaaggaggggtggcaccatgccaacgattaaagattattacttgccaaagcggccaacattattattttcgttgcatccagaaccaacacaagcgattatcaatggcaccaagattctggaatatcgtcggcgtttttttgcacgtccgtttcaagcatttgtctatacaacgggggataatgggggaattcaactctttttgcgttgtgatcagggtctgcaactcgtgcctgaacaattagcgcttgtgggcgcattgttacagcatgacgcgcccacaaccaccgcggcttattttgaaggcgctaaagccggattggcgttaccgattacggcttttacaaccttacctaacattccgttggcacagttacgtcgtcagtttgaaaactttgttacgccgcggagttatgtcttcttagatcagcctgaccggcaagcacagttggattggctattaacgcaaccctgtgagtcgctaactattttggactggcgcaaacggtatgcagcactggcgactttgttacaaaaatgaagccaagcttgtcttaatcgggctgcaactagtgcgccggttataagaatcaaacagccactcgttgtgtatttgctgagcaaaaggacttagctgtgacaactgccgtaaacgagtagtcatttagcatgactgattggatttgatcgtaaaaaaagaacctgccacaagtggtcaggttctcagattaattagagcattttttcatagacgtagcaaacgtcatcgacatggtatacaccgaccatttcgccaactcgcttgaagttcatctttgcaatcagatgttgcatcgcttgattgtcggcatgagtatcgatacggatgctcttgatttcaggatgatccgcagcaatatgagcaatgattttttcgaataattgagtggcataaccatgacctgcatggctagaatgaatcgcgactcggtgaatcacgacgtaaggtgccgtggtatttaaccattcggccttcgcagtatcgtaagtttcgtctggtgaaggcacgacagcgacagcgccgaccgttgcgttgtcgtcggcattgaataagtatgctgatccttgcatgatgtcggccgtgatttgtttgcgagacgggtagtcgccttgccactggttgaccccagcttcagcaagttgattacggccgtcactcagaatgtcgatgatcgtatcgagatcatcgagggtcgcttttttaaagtacataattctagctcctctcttgaacagcgattgactgccgaagcagtaatcgacttttaaaagtatacagaatttttagaaaaatgaaactattttctaccgattcttaggagattttcagtgacgattttcaagtaaaatcttgcgcgcttctcgggccatgtcatgttgcgtattataagcagcgaccgcactcggtgcatattggtaagtattagtccgcaaagtttgttcatagaattcgaagtagggtaagtgggtattttgcgcaatcgtgatagcacgctgccaatcgaaatctacggcgcggtaatcagcatgctggaggccagtctcatcaattgtcagaagcaagtagtttgctcgtggttggcgtaggtggggattaatggcagtcggaagaccaactgtcccggcgtttagaatcaactgtcccgtggttgcgtagcgcatgatgggctggtgcgtgtgcgcgtagatgacgatatcgatatcgccttcagcggcttggtcaaagttggcctgactggcagttggtgcgagcgcgtgtccactagcgacggtcggtaaaacgtgttggagacggatggttaacgggccgacgtgtttgatgactgtcattggtaagttcagtaaccgttcaaagtgtgtcgaactcagctggcgccgatcaaaagcagtgagaaccgttgccataatttgtttgggtttagtaaacgtgttgggattggctgccattactttttggtagttttcctcgtgatttccgagaacgtaggcggtggggtgaacgcggtctagtaaggtgagacagcgctccgattctggcccgcgaacggtcatgtcgcctactgtccagtattcgtcaacgtgttgtttctgggcgtctgctaagactgcttcgagtgcagtagcgttaccgtgaacgtcagataggactgaaatttttaccatgttgagatgcttcctttctactatgtaatctaaactctggtgagatgttttattctggtaaacgtgggttttaaaaatttatgaatgtaaccactatgaaaagccatcgtaacttttatctgttataatgggtatgaaacgaagtaatatatagcacgtatattcaagccaattcgtttcgtgccgtggttatccttgcgataatcacggtttttattttaccatagtgccttatgattagtttggttggtgtcatttaattgtatcagtacatggaatgcgggtgggttaccacacatgtaattgcccagagttcaaggtgacttacatatggtgtgatattgtttaaactgaatggattgcttctaaatatagtggttaaactaattgtttgtgaaagaggttttggataaatgatgacaccttacaaaaaagttaacgtaacggatgcgcctcgactaaagctggcaattaatttgactagtgtcttgttgtcttttcaatgttatttagtaatatgattcgagccagcaccattgatattgggcatgtagcttggctaaaatggtcattttagcaattgggactgttgcgattcatgggtgcgggttgtactggggaatttttacctagcatagcaactagtgataacgttgcgatactgtctgatagaagatacattgcggggtatgactatttatcgctaaaaattgggaaattagtatccacgataattgagttggagtatcaaaaggccatcaacctgcgtatatgcttcgcggttgacggcctttagtttagtgctgaagtcaaagtagctatgtgaatggatctcatctcaaaacaagctatacaccaaataaatattcaacaccgtaataattccggccagtccatatcccacccacgttaccgttgggcgattaacgtgggtcttcatcaggctggcgtcatttgtcagcgcaactagtggcaacaaggtaaaggggagggcgatgctgagtgccacttgcgcgtaaatgatcaagttttcaaaggcagcgtcactaaagccgactaacataccgataatcagaatcggaattagcgtgacagcgcgagtaagcagccggcgttgccatagcggtaagcggatgtgtaaataaccttccatgacgatctgaccagctaaggtgctagtgatggatgaaattaggccggtaattagtagggctaatgcaaataaccagctcatgaccgggctagcaagggcgccaaccacggtggtactttttaacccatcgaagacggcctgcagactcgctaacgcgttggtgtgaccgaagaaaagcgtcccaccaaggacgagcaaaagtgcgttgatgagaaaagccgcaatcaagtgcactgttgagtcccaattggcgaagcgcagtgcttctgtgacttgggctggattatgataatcataacgccggctttgtgcaagcgatgagtgtaagtataagttatgtggcatgatggttgcgcccaagattccgagactgaggactagtgcggtatgatttttgacgatcaatggtgttggaactaagccgagcaacacgttgccaaattgaacgtgggcccgtcccacctcgataccaaaaataatgccgacggtcaaaatagcgacgaggacgattacttcgacacgccgaatgccaaatctcaaaaacaacaagacaactaagacgtccgcaattgtcagtaaaattcctgcaagtagtggtaagccgaataacatttttaaggcgattgcggttccaattacgcccgtcatatcagtcgccatcatcgcgacttcgtttaaaatccacgcggcgtaacgcacgggccggggcagcttgctagagatggcttgtgctaagtcttgccgggctacaacgcctagcctgattgccaggccttgcatgaacatggcgacaatgatggctaatgcgagcacggctaaaagccggtactgaaactgaccgccaccggctagggatgtcaaccagttgccgggatccatatagccgactgccactagtgcaccgggaccgctataggctaaaaatttgcgccaaaaggccgtctgatgaacgtcgggaaccgcgacgctctgattgatttcttcaagactttgatgacgatgtgattgcatggttcgacgcctcctgcttttggatagcgaggtcagccagaaattggctgaagccggtatccttattcatcggtggtactaagtcaaaccgatcaccaccgcttgcccgaaaggtttgataattttgaacgtagtcttcctcgagggtttccaagcagtccacgacaaaggatggcgtaactactaatacgttgcgtttgccaagttcgaccaactgcatgagctcattttttaagtaaggcttcaaccacggcatcggtccgaacttggactgatacgccgtaatgaccttatcagctggtaattctggtcgctccgccaacacagctttggtcgtggcctcgcattcgcgttgatagggatcaccatggcggaccattgcagtggggatgctgtggtagctgaagatgaccgcatcataatgatgcgcctgatagctttgccagactttggttgctagtaagtgaatgtaggtcggttggtcgtagaaactgtcgataaaggtgtgtggtaatccagttgcttcaacttgacgatggatgccgccgtgcgtgctctgggtgtattgcggaaaaagtggtaaaataattggcttttcacacccatcagcaaccatggctttcaaggtcgcaccgatatcgggttgaccgtacgtcattgctagtcggacgtcccaatcgggtaatgctgcttgtacttgttggcagatggcttgactgtagacgattaatggtgagccttgtgggagccaactatcctgataaaaggtggccgaacgccaagaacgggtcggtaagataataccacgcaacagcggttgccagagtgcggctggcatctcgatgacgcttggatcacttaagaattcttgtaagtatgttttgacatccttagtccgtggggatgctggggagcctaaattgacgagtaataatcctgggtgcatagaaacccctccaatgctcttgataaattaatcatagcataatcatcagcttgtatacggggttaatggtttatttattcgattatctagtgataatcaatttactgctgaaataaataaaatctcttgctagcaactggccgggctagcaagagatctgaaattgatatttggttttgttgcagttcaaaaatcggtgtcgtcggctggatcgtactttaaaagtagattcagaaatgccagcaaaagccatgaccatgttcgtttttaggtcgtcaacatcaaaaggcgattactgggtggacttggtgagttgagctgactaacgggcttactttgcggcgtgggtccgtcgataacgttgattgagatagtagcctagatagcaaatcgccacgaagggaatggtgtaatacaaggcaatccgctggttagggtcaaaccaaatcaagatacaagagagtccacttaagataaaggccagccacgggacgaccgggtagccgggcgttttaaaagtcaattgatcaagcgactgcccacttttcaggtaggctttgcggaagttgatctccgaaagggcaattgccatccaaacaatgacgacagcaagtcctgaaatggatactaagaccaggtacaccgaaccggcggcatagacactcgacaatagggccagaatgccacccagcatgctagtaattagggcgactaacggcacatcacgcttcgtggttcgtttgaaaacctttggaatggttccctcgttcgcaagtgaccacagcatgcgggtagacgcgtagaggccagaattagcggccgacataatggcggtcaatacgacgaaattcattaaatcagcagcgtagggaatcccaatcgctttgaagacgagcacgaatggactttgcgtcacacctgcttgtttgtaaggaatcagtgcggccatgacgaacatgctaccgatgaagaaaataatcaggcgccagagggtcgttttgattgcggtcggaatggtgtgggccggatccttagtctcaccagctgtaattccaattagctcagttccggaaaaggcaaagttgaccgttagcatagtcgtaaagacgccaccaaaaccattggggaaccaaccgttacgcgtatagttgctcagaaacggggcactggtatgaccgtgaagtggcagaataccgaccattgccagtccgcctaacacaataaaagcaacgatcgcgatgactttgatactggcaaaccagaattccgcttccgcaaaccagcgtacggagagggcgttaacggtgaagatgaccaccataaagacgaggctccagatccaggtcgcaatgtgcggaaaccaggtttgcatgatgagccccgctgctgtaaattctgaaccgagggcaatcgtccaagtcaaccaatataggatggcaaccgtaaagcctgtgccaggaccaatatattttttcgcataaacgtgaaacgccccggtgtagggcattgcaactgacagctcacctagacagagcatgacgagatagacgaggatggccccaatggtataggcgagcagggtcccaattggccccgcttgatgaatcgtgtaaccggaacttaaaaataatccggtcccaatcacgccaccgagtgaaatcatcagcacgtgccgtgattccatctggcgactgaggtgggtttgttttgacataatgtaccggccttccttacttgcagaattaatatgattagactatgattagaaaatcaacaatgctattagaataacataatttataagtagaaaggaaggcaattattgcaatgctttcattaactgaacaattgaaccggggcccagtcgtctcggacggtgcgatggctacggaattagaaaaacggggcgtggcaaccaatagcgcactgtggtcagccacggcaatgttggaccacccggatgcgattcaaacggtccatcagagctatctggatgcgggcgcaaaaatcatgacaactaatacataccaggccaacgtgcctgcatttgagcaggctggtattgctgccgcacaagcgcgtcaattgatacaacaggcggtgacaattgctcatacggcgcgtgatgctagtcatgtcacggatgctgtgattgctggtagtattggcccgtacggtgcttacttagcggatggtagtgagtacacgggtgcatatcagttaacgccgagtgcctatcaagactttcaccgcgaacgcctggcgttgatcatggccgccggggtggacgtgcttgcattagaaacgatgccacgtttagacgaagtacaggctttggtacaactaatcacaaccacttggacgcaacaaccatactgggtaagctttagtatcaaggatccacagacattatgtgatgggacgtcattagctgtggccgcaaagtgggtggcggcccagccgaacgtggtcgctgtgggggtcaattgcactacgctggaaaacattgcaccagcgttaaccactttgaaggctgctgtagcggttccgttgatcgtttatcctaattctggtgatcaatatgatcccgtgacgaagacttggcaagaaactcatttgagtcatcaatttgcatcctttgtcccccagtggttagccgccggggcccgcattatcggcggctgttgtcgcacaacgccgaaggatattgcgacggtggcacgggctctcagtgtttcggattccgccaagctttgaaaaatgttaagaaatgacggtgttttagttcatggtgggcgtgtctcagagatctaagttgtcttggggtgttcgttacacactaattattgatttaattatatttgagcaaaacaatacctagcgtgctgagcgtcactaggtatggctagcaatttaattgaaactggtgaaaaatcactagtcgggcactgctgatacggtagttgttcacgactagcgatttttgtatgtcaataaaactgttcatatcttggtcgagtaacgtaaaatatggtagggtaaagatagtgtatagatataacagatgaagtggtcaatcgtccgtgcgtactcgaagtttttgaactcggtgacaggatgagttgatttttcagattgagaagggaacggctaggtgatgtattattttgtgggtactggtttaggattgaaattgacgggaattgaaaaggcacagttgaaccgactggcgctatttgacgccgctggttatcaggctcgatgcgtctatgtcacttataatccgcgtttacatgagcatgcggcccgctttggtgcggaaggaaaatgctttagtttgtatgatttctttcaggggacgatgcctgaagcagtgactaaaatccatcatgattggatgcactattggcaagctgtttgtcactttaaggtgattcaggttccaaatacgacggattttcgcgtcctggataccgatggtcaatatttgatgtacgttcattttgtggacgccgggcgacaacaattggattatgtaaattattttgataatcagggtgttaaagtccgacgcgaattttatgataaccggggcttcctgagccggacaagctttttagtgaaacatcaggaagtgcacacagaagtgtattatgatttacaagggcaagtcaaaattatcaaacagtatgatattaccgggccagagccaaaactacgactgattacgttgaagaactatcaacaaagagactttttcttcaataccgaacaggcttttcagacattcttcttcaatgaattggccactgctgatgacgtctatttctgtgatcgtaaccgacaaacggcggcggccttaggtcatacgcgccccgcaactcgcgtgtgttcagtcttacatagcacgcatctacggattggtgaggacgtggtaagtgggcatttgaaatcggtctatcggtatgtcctagcccatccagaccaatttcaccgaattattgtgtcgaccgagcatcaaaagcgtgatttattggcacgctatgataatttaccaccagttgtcgtgattccagtcggctatacaacggttcatccggttaaaattgatggtcgtgacccgcaccggattattagtgtggcgcgctattcgccagaaaagcaattaccacatcaactggaagtggttcgtcggttagttggtgaatttcccgacctgactttgcagttgtttgggcatgggcaaaagattgaaatgcaaatgcgtcaatttattcaggccaatcatctagaaaaaaatatcgttattcggggtttcttgcccaatctggcagaagagtaccagcgggcaagcctcgccttaatgacgagtgtggaagagggcttttcgctagccacaatggaagctgaaagctatggcgtgccggttattggctatcgaattgcgtacgggccggaagatattatcgaagatggcgttaacgggtacttagtgacacccaatgatgttgatgagttgacaatgaaagttcgtcagtatttacagcaccctgaacgacaagcacaactgattacgaatgcctacaattcagcaactcgttacagcaagcagacgattattgaaaagtggcgccagttaatagcagcactttaagaactggtgataggggcaaacaaggcgtctacctagtttgagagactaggtagacgccttgttgttatctagatattaataaagtaataaaatcagtgccaactgaacggctacgttgatcatgagatgtaaccgagtacggccaaaggactgttgactgaaccaaacagcaatcgtgatgagaattgcaacgatcgtttgccaggtcagcggctgcaggaagatggtgataacaagtagcaggccagtgatggccgaaatcaattgattgatttggcgttgacggctgaagctcggaacgtataggaagacataactagccagcatgggggtcagcttccggagaaaagtagttgataaatagttattttgtaaatcgaagacggccactgggatcgtgaacgtcatgatgacgccgaaaacgactagaccaaagtagttttgcataccgaagcgtggaacagccatcacgagcaaccacgcactgcacgttaatagcaggtacagtagttcggattccttggcaataatgttggtaaatgcaaaggccacggtaattccaattgcaatgaggctccactggggagcaatccgccgatctaagataatgaagaccgcggcggccacggctaaggtgtagccaatcagtggtaactgcgcggctgaaaatgaggccgtttgaaatgagcgcccgtaatcgagggcggcccaccaactaatgatgctttgaacgatggtaaagatcgccaaggcgatgtaatcgcgtttaatatgtaattttccgattcgaatcatattgtcaacactctctaattaggataatgagttaatcgtaccggtcggggcagttcccgtcaataatttgacagaaatctttaaaaaaaatggtgattgtgataaccttatatagttatgagccgttcccgaaaggataagtttagcttgttcaatgaagaataagtgatgcttagatgccttgtaaccgaaattatcaagggggaatttattgtgagtgaaagacacttatttacatctgaatctgtctctgaaggtcatcctgataagattgctgaccaaatcagtgacgctatcttggacgcaatgttagcccaggatccacaagcacgggtcgctgttgaaacttcagtgacgactggattagtgctggtcttcggtgaagtttcgaccaaggcctacgttgatattcaaaaggtcgtgcgtgacacgatcaagtcgattggctatgttgatggtcaatacggctttgacggtgacaactgtgccgtccttgtctcattggatgaacaatcaccagatatcgcgcaaggggtcgatgattccttggagacgcgttctggcgatgctgacccattagatcaaatcggtgctggtgatcaagggatgatgtttggttatgccatcaacgaaacccctgaattaatgccactgccaatcgcattgagccatcggttgatgcgtaaaattgcagcgctacgtaaggatggtaccattaagtggttacgtccagatgctaaggcccaagtcacggtcgaatatgacgaagacaaccaacctaagcgaatcgacacggtggtcttgtctactcaacatgatcctgatgttgatttggacacgatccggcaaacggtcattgatcaagtcatcaaggctgtgttaccagctgatttattagatgaccaaactaagtatcttgtgaacccaactggtcgttttgttattggtggtcctcaaggggatgccggtttgactggtcggaaagtcatcgtggatacgtacggtggttttgcccatcatggtggtggtgccttttctggtaaggacgcgaccaaggttgatcgttctgcaagttacgctgctcgttacattgccaaaaacgttgtggctgccggtttagctgatcaggtcgaagtgcaattggcatatgccatcggggttgccgaaccagtttcgattgcagtggatactgccgggaccgggaaggttagtgatgaagcgttgattaacgccattcgcgaaaactttgatttacgcccagctgggattatcaaaatgctcgatttgcaacggccaatttatcggcaaactgcggcatacggccactttggtcggaccgatattgatttgccatgggaacatactgataaagtggatgctttaaaagcagcatttaaataatgcggtaacgttgattcgttacggtctgtaggtactcgacgctaaaagcgaccttttttcaaggtcgcttttttttgcgggctattttagatgcacggggttttaaaatgattgatagagaaggagaattactaagatgcaacagcgtaaaactaacgtaatggcggttacggttgccatttacgtcgcgacgtttatgagtgcgattgaagggacaatcgtgtcgaccgccttgccaacgattgttggtgatttacacggggtttcattgatgaattgggttttctcaatttatttattgactaatgcgatgatgacgccaatttatggaaagctgactgacttggtcggccgaaaaccagtgatgcaagccggactaattatttttattatcgggtctatgatgagcggtttgtctaattcgatgccggtgctaattttttggcgggccattcaggggatcggtgccggggcactaatgccagtctcaatgacaattatcgcagatatttattcattcgaacgccgggccaaagtgctaggcttcaatagttcagcgtggggcattgcttcagtgctggcaccgctgattggtggactaattgtcgataagctcagctggcattggattttcttcattaatgtgccagttgggttgatcacccttttcctatttcaattttatttacgagaacccaaacgtcacaataacgtgaaaatcgactacttgggtagcttttggctgatgctcttcttgctgtgcttgatgctaagcttccaactattgggaaacgccactatcagttgggtggccgttgggactgcttggatcattagtgcgctcagtttgtggctatttattcgtcgtgaaagtcgcacggatgaaccagtgatttcgatggatttattcaaaaaccacacgtttattattcagaatgccgtagcggccttagtcagtggcttcctaatggccgttgaagtttatattccaacttggactcaggggatactgggtgtaccggcttctttggcgggattcgcagtgacaccgagctcgttaatgtggatcgtcgggtcattcgtgacggggcggttattggcaaagtgggcgccgcgacggattttgtatctgagtttggctttcattctcgtgacaagcatttgcttagcgtggttaccagttaatactgctttcccatggttcttcctgatcacagcgattggtggtgtgggcttcggaattacaattacagcaacgaccgtcacgtcgcaacaccttgtgccagctgagaacgtgggcgtcgcaacgtccttcaatacgttgagtcgaacgattggccaaacgttgatgatttcaatctttggaattgcgttgaacgttgggatgaaccaaggtattcagcaccatgcaggaacgaacatggcgatgatgaacaagttgatcaatccacagacagcaacgcaattaccgtctcatttgttgccgacacttcatcgtatcttatatacgggcttacattgggtctacctgattggccttggtttggttattctagcctttattgtgaatagtttggatcgcggaccacaaaaaacggcagcacaacacgcggctgatttaaaccaaaatcaggattagtcggcttagtatcaacaaattaattgtcaaagcgactcataatttgtcgtttatttgatattgacgtaaaaaaaatctgaaaaatttccaataaaatttccataagtgttataaataaattttaagttgttagacgagtgtaatgggctttatgaggcctattacactcgttttcattaatattatttatttggtaactattttaggaaaattaatggaaaacgtgtaacaagattgacggtatcaactattgccaacaaaacataatcatagtattatgagtgcatagcctaacgattgatggtgtataccaatgatgctatatatgtgttttttgtatcatatataaacgggtttgattaggttagagaaggaaggcaaaaccatgaaatttctgagacataaatcttttaggggagatccgcaagttcactacaagatgtttaaagtcggccgtacttgggtatttacggcgatggcatcatttgtattgactgctgcacctcagttagtatctcatgcagatacggtttcggcggatactagtagcgatacggcaagtagtgccactagtagtgccagctcgggggcggatacgtcttctgcagcagcgagtgcggcggcactagctgctgcaacggcaagtagtacgtcaactagtactaccagtgactcgtctacggcatcttcttcgagtgaaactgcctcgaacagtaattccgaatcttcatcggatagttcaagcagcgatgacagtgcttcagacgcaagttctgcgagcgaaacaagtacgactaatgcgacaagtacatcaagtactagtagtagcagtgtttcaacggctagttcgagcgcatccagcgcaagttcaagtagtagttcgagctcgtcaagcgctacttcatcgagtttaactgatagcagcagttcttccgcagctagctcaagtacgacgagtttgtcaagcagtgctagcgtagcggcaagtactgtctcgacagcaagcagtgttgccagcacgactaagtctgcaagtacggcggcttcaacggcagccattgcagcttactcgtcggtatcggctgccagctcacataccgatagtaccgcagctaaggcggcttcatcatcagcttcattagctggttcatacgccacacttgccagcagctatgctagtttggtcaataacctaacgacgcaagcagcagtgagtgcggcccaaagtgcctatcaagaagcgcttaacgcggctgatttgtcacggcactacaatagtattgcaaacatgtacttagacgcattgacaaatggtgtggggtccaatgttgataatgcaatcgcatactctggtgcaaactctttagcatatagtgcagcgagtgcggccagttcatacgcagccctggcttcaacggccacctcaacggccagcagtgctgctacccaaggcttaattaatttagcaagtagcaattattccgccgcatctagtgcggcatctgcagccacggtagcagccagctcggcagctgaagcagccaacagtgcatacttagccatgcaatacgacaaaaataatacggccgttacctcagcttacaccgttgcttctagcacggcagctgcggcttcaacggccgcggttaacgcaacgaccgctgcggtggcagcttcctcagcctatgccgcggtaagtagtaatgcggcaaataatgactatgaagccactagtactgcctatgcagttacttcttccgccgcaacggaggcgcttggtcaatatgccgccgggagcaccgctactagcaccgctagttcggcagccagttttgccaacagtactgcaattagtgatttggcgagtgcggcttcttcaagtgcaaacgtggcgaatacagcaaagagtacggcttcaagtgcggccagtgtggcagcaacgcaaactggtactcaagcgtcagcttatgcttcaagtgctgcaacggccgctagctctgcttcatcagcctacgccgtcgcaagtacggctgcaaaatccgctgtcagtgctagtgatcctgccaccgcggactcatacgctcgggtggcccaatcggcatcttcattggctgctagttacgctgcaactgccgagtctaacgcgactttagctgctaagttttcgacggatgtcgctaatgaacaaaccgttagttccaatgcgactttaacgacgagtacggcaacgcaaagtgtctcgactggagatactgtgacaattaccaacaaggtgggtttggattcagggtattcagtaagtggtacaccaacttatgtttggtatgtctcaacggatgggacaacttggacgaccattagtggtgcaacatcggcaacgtatacaacaactgcaactacttcagggacgtattattatcaagcagtcgtgagtggtaagcgggttacagcaataatcttgacttcaagttttaaagcagctggtaatgtgattaccattgttgtcactaatccagaaggaacttacactgaaattgccagcagttatgccagccaagccaacagcgcagcctcagtggcaacctctcaagccgtcgctgcaagtagtgcgatcagtttggccagttcttcagctaacttgacgggctcattagctagttactacacgtcacaggctaattcttcatacaacgcagctagctcatatgcgagtgtggcttcggaagcagcaagtattgcaactatggccagtacttcggccgcttcttatgaagccgaaggggcgtatactagtgctaatatctgggcaggaatggcatcgagttatgcgagtgttgcaaccgaatatgctagttctgcaagtagtgcggcatctgaggcagcagctagtctcgatactgctttgaaaaatgcggttaatgaagatggcggtgataccgctgctgattatttagcatcaagttatgctagtatggctgcgtcatcggcaaatgtggccggtgaccaagcctcgctagctgcatcctatgcggccaacgctgctaatgcatataacgttgctggttcttcatttaataccactgcaactagcagttataatgcagcggcaagttctgcggctgtagcggctagttcatacgcagcggcagctagtgaagcggcaagccttgctgcttcatatgcagcggacgggaattataattcggctgccttgcaacaaagctatgcggctttgcgtttgacttatgcaacagatcaattgaatgctgcttcgagtgcggcaagtgcgattacccaaacggtcgtgcaagcacaatccagttattataattcgattgcaacggctgcttctagcgcagcgtcagcagctgaatcggcagccgggaacgcaatcagtgtcgcgagttcattaagtgcaaagtatgcgtcaaacaccacgttgggtagctcatacgttgcacaaactaataattatgccgtgacaactctgggtgcagcggcggccgcaacttcagctgcggaaatggcagctcagtatacaagccaggcttcatcggcagtagctgcgggcgattatgctatggccagctcatatgtgaccaatgcctcagcagcagctagtgaagcaacctcatatgcggcattgtctacatccaatgcggctttaggtagtacggcggctagcaacgcgacgaattattcaaacaatacgaattcatataaaagcactaatacgggtaatgcaacgacaattctagggattgttatttctggtgggatgacttctcaacccgcagcagtgacgtcgaccgtttctggtgggacctttaccttgtcagcttcgtcagcattaggactaggtggggttgcactatcatcaaaaacaacttggtatgttcaagtcaacggcacctggatgaccttagatgatgccagcgattatcttgaatcgtattcccaaagtgacaatgctggtttactatcaactagtagttcattaacagttactatcaaagcgggctatactggatcattgctgttccaagccgtacaagggttttcttggctcttgggaggcgcatttccagtttatacgtttgcaagtaatttagctgaagtagatgtttatagtagcaatattccagcaacaaatatttccatagctggtgatgattacgtcattaatccaacgaacagttcgagtggctcaaacgataaggttactagccagtttacatcaacgactaaccctgagaatgctacgggaacgattagctggacgacaagtgattcaagcattgcgacaattgatgcttctggccttttgaccgttgtgtctaatggaacggtgacaatcacagcaacaattacaaatgcagacggaactagctattcatcttcaaagacaattacaattggtagtggccttgaggatacgtctgttgatgcaggaagtgatttgacgtgggttccagatggttcgactacgggtactgggactaatgttacttatcaatggtattattcttcaacagcggacggtactggaacagcgctgagtggtcagactggtacgacacttaatctgtcggatctgacagtagggcaatccggttattactacctagttattactggatccaatacgactaacgggactactaccacgacaactgtaactttaggccgggcttacttgactgttaatgctgtttcaactgaagcggcagattctgcagctagcgaagcatctaactacgcaaatcaagcgacggaatatggttcagttgctagttcttatgcgaacattgcgggcgaatatgcaagtaaaaactcagaagcaagctcctacgcagaacaagcaacggcagcagcttctgatgcacagtcagctgcaacagctgcttcaactgcagcctctaatgcggcagctgcccaatcaaatgcagcttctgatgcacagtcagctgcaacagctgcttcaactgcagcctctaatgcggcagctgcccaatcaaatgcagattctgcggaagctgccggcgaaaactcggctgcttccagttatgcagaggaagctaaaaagaaagcgtccgaagcgtctgaagctaaaaggaaggcttcaagtgccgctgatgatgcaggctactatgctgatttagctgctaatgttagtgaagatgactcggatagtgattctgacggcgacagtgattcggatagcgacagcgattccgactcagacagcgactcggattctgatagtgattcggatagcgacagcgactcagattctgactctgacagtgattctgattcagacagtgattctgactcagacagcgactcggattctgatagtgattcagattccgacagtgattccgactccgacagtgattcggattccgatagcgactcggactcggacagcgactcagactccgatagtgactcagattccgacagtgattcagactcagacagcgactccgattctgacagtgactcggactcggatagcgattccgatagcgacagtgattcagactcggatagtgattcggattccgacagcgactccgactccgatagtgattcggattcagacagtgattcggactcggacagcgactcggattcggatagtgattccgactcggacagtgattctgatagtgacagtgactcagactcggacagcgactccgattccgatagtgattcggactcggatagcgacagtgactcagattccgacagcgattcagactcagacagtgattcggattccgatagcgactcggactcagacagtgattcggattccgatagcgactcggactcggactccgatagcgacagtgactcagactcggacagcgattcagatagcgacagtgattcagactcagacagtgattccgactcggacagcgactccgattctgacagtgattccgactcggacagcgattccgattctgactccgacagtgactcagactcggacagcgactcagattctgacagtgattccgactctgatagcgattccgactcggacagcgacagcgactcagattcggatagcgacagtgactcagattccgatagtgattcagattccgatagtgattccgattcggatagtgactcagactcagacagtgattccgacttggatagtgattcggattctgacagcgattcagactcagacagtgactcggactcagacagtgattctgactccgactcggatagtgattcggattctgacagtgattcagactcagacagtgactcggattcggacagcgacagtgactccgactcggatagtgattctgactcagacagtgattcggatagcgacagtgactcagattccgacagtgactcagactcagacagtgattcggatagcgacagtgactcagactccgacagtgattccgactctgatagtgattcggattccgacagtgattcggactcggatagtgattcagatagcgacagcgattccgattccgatagtgactcagactcagacagtgattccgactccgatagcgactccgattccgacagcgattcagactctgatagcgattcagattctgacagtgattcggatagcgacagcgactcagactcggacagtgactcagatagcgacagcgattccgattctgacagcgactcagactctgatagtgattcagactctgacagtgattccgacagtgactcagactctgatagtgattctgactcagacagtgattcggatagcgacagcgattcggattccgatagtgattcggactccgacagtgattccgattccgacagcgattcagactctgatagtgattctgactcagacagtgattcggatagcgacagcgattcggattccgatagtgattccgactcagacagtgattccgattccgacagcgattcagactctgatagtgattccgattcggacagtgattcggatagcgacagcgactcagactccgacagcgattcggactctgatagtgattctgattccgacagcgactcagattcagacagtgattcggattcggatagcgattccgattccgacagtgactccgactcggatagtgattctgattccgacagtgactccgactcggatagtgattcggattcagacagtgattccgactcggatagtgactcggattccgatagtgattcggacagcgacagtgattcagatagcgacagcgattcagactctgatagcgattccgatagtgactcagacagtgattctgattccgatagcgactcagatactgacagtgattcggactcggatagtgattcggacagcgactcagattccgatagtgattttgactctgatagtgattccgattccgacagtgactccgactctgatagtgattcagactctgatagcgactccgattccgacagcgattcagactcagacagtgattccgattctgacagtgattctgactcagacagcgactcagattcagacagcgattcagactcagatagtgactccgattccgacagcgattcagactctgatagcgattcagactccgacagtgactcagatagcgacagcgattcggattccgatagtgattccgactccgacagtgattcggattccgacagcgattcagatagcgacagtgattcggactctgatagtgattcagactctgacagtgattcggattccgatagtgattccgactccgacagtgactcagatagcgacagcgattcagactcggatagtgattccaattctgacagtgattcggattcggatagcgattcggattccgacagcgactcggattccgacagtgactcggattccgatagtgactccgattcggacagcgattccgattcggatagcgacagtgacagcgattcggactcggacagcgattcggactcggacagtgattcggatagcgacagtgactcggattcggatagtgattcggactccgacagcgattccgatagtgactctgattccgactcggatagtgattcggattcggacagcgattcggattccgacagcgattcggactcggacagcgattcggactcagacagtgattccgactcggatagtgattcggattcggacagcgactcagattctgacagtgattcggattcggatagcgattcggattccgacagcgactcggattccgacagtgattccgactcggatagtgattcggattccgacagtgactcggactcagatagtgattcagattccgacagtgactcggactcagatagtgattccgactcggacagtgattcggattcggacagcgactcggattccgacagtgactcggactcagacagcgactcagactcggacagtgattcgaatagcgacagtgactccgatacaatcacagattcagattcaaatgatggaaccaattctggcaatggtagtaattctggctcagatggaagttccagttcaaatactggatcaggttcgggcaatacgacgggatctactggaaataactcaggtactggcactggtacgacaacttcatcgactgcttctagcaacggtgctgcttcgacaagtacgactagcttgagtgctgcagcaacaagtggtgtctcggccacagccgcaacgttggcggttacgacaccatccagtgacggtgctgcaacaacgtcagcaactgctgctacatcagtggtttatgccgctgctagcgctcaagacgttgatgcaacttctgatcagactgattcagattcgaagagtagtaatgattctgataaggataagaagtcagctgatactgatagtgctgatgataagatcggctcaagtaatactgacgagaatggtaagactgcatctgatacaagtaataatgccggaacgattttcggtggcttgttgaccgcggctgcagctgctggactcggctggtggttcttcttgttcggtcgtcgtcgtaaagatgaagatgaagatcagcgaaaatagttagaatttaaagtgattttgttggcactgtcaacgaagctcgatgtaaaattgaactattgaccaagacgggctgaataagcccgttttggcatacataatagaaattatgaatgaggttaaagtatgcaaaaatcagttattcagaaattaaagcaagcgcttatcgataatggaaatttagaaagccatgaaaatgatatggtggttttggcggtctcaatctctgatcggcggcatcgtgcaagtgtcaagttttaccgggacaaggcttttaataccgtgtggaccacagttgctaacgatcttaatacagcacctaagaacagttgggtgagaattgatcttgttcaggcagtgcaaaagttaaggcgaagtatcttcgaaacgaagctcgctaaagttccaaaaatgaattattggcgatatggtgtaagctttgatgctgatttcaagcatgcattactggaaatggaaataaatggacagaacttttttaagcccgataaagattttgtggtcggtgagccgcctgcaaaatcttgggctgactatcatcaaattgagaattatttaagagagcgtgagtctaatcctacaatcgatattagcggcgcacagaatgtttggatctttacaactgccgccatattctcagatggacaaaaaattcgacctttagcggttgatggtttccttacagctggaattcgaacaattacgaataagcgtaaagaaattaagaaagtgatagaagacggtgaagcgtatttaatcaatcagttagacaaggatggcaagtttatatatggttattttcctgcacgacaacgtgtgctctcaagttacaatattttaagacatttctccacgatttatgcattgctggaaactagtcagttttcgcaacactcagaaagttaccggaaagctaagcttgcaattcagtggggaattgatgcttcactagttgtgattgataatgcagcgtatgtcaacgatcatggggaactaaagctgggtgcccaagcaatgctcattttggcaatttgtaaatatcaggaagtgactcatgatcaaatattcttgccgacattaaaacagttgtttaaaggggttcgctcattttggaactcatcaacgggatttgtacatgtgttggatgtcaatttagcgcctaaaggtaagttccgcacgatttactacgatggtgagattgtttttgcgctgacacgcatgtatgaacttgatccaagtatacagattgaagcaacgattagtgagatgttggattatatggttaagttagattatgggcaatatcatgatcattggcttgcgtacgctgtgaatggtgcgcttgacctatttccagaagcccgtgcgtatatggccttaggtgcaaagaatatttttacgcatttaaactacattcaaaaacgaaaacatgcatcgccaacgttactagaactaattaatgcgtcccaaaaaatggtatataaagttaaaaagtcaggaaatgatgacctgcttgcaccgtatgatgttttaaaattaagtcaattggctgaccaacgggctagctatgaaattcaaactggcgcatggtatgctgaaatagcaatgtatttatatcatccgcagaagtttattggcggattctatgcacgtgatgacagtttccggacacggattgacgattgtgaacacttcttatctgggttgatcaactattataactacacatatcgacaagcataatactaggtaacagaaagggtgactgtatgttttacttcattaatgaatatattttaggcaagaattcgagtgttgagcacgcggcaatcaaccgggtgaaattatttaaccactataaagcgccagcccggattgtgactaagatgtatgaccgtttgctacatcagaccatgggaacttttcagttagcaaaccagcaagtgctgaatatgtttgattactttcaacaaaccacggatgtgccaactaaagttttgcatactgatgacatgcatctgccagttgaatatgcggtagaggtgggtgccaactttagcaaaatttttaatggtgatgaacacgttagcaacgtcggttttattcctggaacgattgggcgcgtcttttaccaagaattcttcgacaatcaaggtaacttatcttcaaccgacctgtgggattggcgaggcttcaagtccagtacacaatattttggtcagaacggtaaactggttttggaacggttttataatctacaaggcgagaccgttattgagcagtactatgtacctgacactaacggtaatccgctagcgtcacgtttgattttaaagaattatcgtgatcaagcagagcgcttcttccaggacgcgaaccatttatttcgtttcttcttggccgaactcagtcatttggacaagcaaacgacgacctttattagtgatcgcccaggtaccagtgtgaagccgttgttggaacttcaggatgattctcacaagtatgtgacggttccaatttatcaggcgaaggatattaatgacccaattcattccccgttggacgggttcttaacaccggccttcgataatctgcaacactttgatggcttcattacagctactgaaagtcaggctcagcatctgcggacgcggttccctaaagctaaggtgacagtgttaccaactgtaactacgagtccgttggcgcagagtaaactacggccaatcacggcccgccccaagcaattgctatacgttgggcggctggcgccggatcggcaactggatcagttaattcggaccattgcgttagttaagcaacaggtcaaagaaattcagtgtgacttttacggctacggcgatccagagtatcttaagacgctgaataagctggttgaagaattaaaattgacgaataatgtgcatttattagattatcatcctgatttagaaacacgttatgatgattatcagctgttgctcaataccgatattgttgatggtggtccaatgagtatgccggaagccatgagtcacggaattccagtgattagttatcgctttaattatgggcctaaagattggattgatgacggtcatgacggtttcatcgttgatcctggcaatcaattggcgctgcgtgaccgggtcatcgaattaatgacggatacgaagaagttgacggcattcagcgaagccgcctttaagaagcttcatacgtcacaaactgacttaaaagtttggcaccgttggcaacaattactgggtattaagtaggagggcgcatatgtattatttcttaaacgataacatgcaattttcaaaatcaggaatcgaacaggcggaaatcaaccgactgactttattcaagaagcaccatgtggctgctaaaatcgtgacccgcgtattcgcaatgaatttgcacgatgtgcttgaaggggccaacattgccgatgctgattttgttaatctttttgacttcttttgtggtagtcagtcggtcaagcgtcaaaggtttgatttggccgactttgaagtgccagccgatgctatcaaaacccggaaggataatcagattcaagtcatggaatgtggtaagttaatcatgattatttaccttcgggccggtacggaagccgttagcaatgtgcaatactttgacgttaatggtcgtacgctcaagatgagttggtgggatacgcggggctttaagtgtcttgaacaattatttgactgggacggtaagattgcccaagaagcgtactttggcccggatggattgattcacgtggaaaagttacacttgttaaatcacgctggtcaggagcgaatcacgtggcgcgtcttgaactacaacgagcagagccatacttttaatgggatgaatgaactgacccgttacttctatgatgaacttaaccagttgaatgatgaacaaaatgtcttcatttgtgatcggaccgtcgaatgtgcctggggcttattcaatatgaccacaccagctaagaaagtcttgcatctacataataaccatgtgagtgatgctaaggatattatgcattctaccttgaacaataattatgctaatgcgctgaataattgggcggcttgggacgcggtcatttctgcgacaccggaacaaactaaggacgtggaagcccgctttggtaaggatattccagcgttcactattccggttggctatgttgataatgctacgttaaaagccgcgccggtgaagtttgaccaacgacaaaaagacctcgtcgtgcaagttgcgcggctggcacctgaaaagcaacagaatcattcaatcgaagcctttgttgaagttcacaagcagtttcctgatgccaagttggaattatggggttatgcgaacggggatattgaaaagcaactacatgcacaagttgctgcagcgcacttggaagatgtggtattgttcaaggggtataccacggatgtcaatgccgtttacaaccgggcccaattaggacttttgccaagtcgagctgaaggattctcattgatgttgttagaagctcaagcccatgggttaccaatggttgccaatgacgtgaagtacggcccgagtgatattattcaggatcataagagtggaatcctaacgacagacggcgatgtgcaacaattgaccaaaacgattttagaattgttgaagaatcaagggcagctggcacaatacagtgctcaggcctatgaaaatgccaagcgttattcagaagaagccgttttcaagcagtggcaagcattgttagattactttaagcctgctaaggtcacggcttaagtagatttgacggcaagggagggcgcaaaatgttaatgattatgaccatttatgggaccgttaagatgtttacccgaatgatcgtgtactgtggcatcggtggtcttgtcctaattgttcgtcaccataatcgtaagaagcggcgtaacgagatggacgagggaactaagcggatcatgcgtaatacccctaaggatgagaacggtaagtatccgtgggagaagtaaggtaccattggtttttaagttaagtatctaattgaaaagacctgtcagacgaagctaatcgtctgacaggtcttttcggctaatttatcgttaaattaacgtttctgaatggccaacaaatatggcggcacatggacttgattaataaactgatattgtaggacttggaattgatgctggtctaaattcgttacgtaatccaaaacggcttgtgcttctgtcgcaccaccgggatgaccagcatagactagcaggataatgagtccgttggtgacgaggcgttcctgaatggcttttatggccgttaacgttgtcgttggtttcgtaatgatttgtttatcgccacctggtaaatagcccaggttaaagacggcacacttgataggttgatcagcggcaatcttatctgcgatgtgttcatggcccgtttgccacagagtgacttgatgggtgagcgctgctttatctaaggcagttgtcgtcgcttcaatggccgctgattgaatgtcgaacccgtcgacgtgaccagtagtcccgaccagcttggcgaggtagacggtatcatggccgttgccaaccgtcgcgtcaatcacgtggtcaccgggattgacgacttggttcattagcgcgtggctataagctaatgccgaactgagttgaatgagtgttacccccttgttgaattcatgaattagggccgcaatcgaagcggtccgtgccgataacgcatactaaaacgcgcacttatatatagtaaaacacttccaagtaaaaggccaccgattgtatcgctgggatagtggacgcccacgatgacccggctgatcatcattaacaagatggccgttatgccgagggcagtgagccagccagtcaaggcattgcggtgccagtagtcaaatgccaacacgagcagactaccgataaggacggtcgttgttgtcgagtgcccgctggggtaactataccccccaatttggacaagtcgccaagcggttggccgtggccgcatgatgacctgtttgatgagataattaccgtagccggcaatcagccaggtggtgacccaaaagaagactgcgccgcgtgggttatggcccagccagagtgccaggccgataattaacgtgattatggtgatggtgtggggattgccaagctgcgtatacgtgaccatcgcgtgttgaaaccactggggactatgatgccaaaaattagcaaccgtggtgtcaaagtgtgttaaccaaggcgcccgttgccataccgcggccgtccagcctaaccatcctataaatataagtagaatcaaactgtccgaacgttgccaggatcgttgcttcaatactgattcctccgataaataaattattgccattattatagcattttttatcaggggtccgattaatgccgatgataaaatttatcgccagcggggcttgggcccttgaaaaaaacgtgctggtttgctactatgaaaacaataactttacgactctgagaaggaatagtagtggctggtgttttgcagaaactccgtggtagttgcaaacggggattcaccaatcatgaactcaccttcgagtcttccggctgaacaagattgtaggtacggacgtggtttcgcgttaagattctcaagaggccacggtaacgtggaatcataggtggtaccgcggaacccgttttcgtcctataagcttaattggcttataggatttttttgttttttaaccgcttttactgagttgaagcatgaaaatgccatcttgaatagtcagttggaaagtcgcaatgctagcttttacatacaaggcagcaagaaaggggcactactatggcatacaaccataaagtcattgaacgcaaatggcaacattattggaaggaaaacaaaaccttcaaaacattagatacgacggataagaagaagtattacgctttagacatgttcccatacccatctggtcaaggattacacgttggacatcctgaagggtatacggccacggatattatgtcacggttcaagcggatgcaagggtacaatgtcttacatccaatgggttgggacgcattcggtttacccgctgaacaatatgcgctcaagacggggcataacccgaaggactttacggccaagaacatcaaaaacttcaaacgtcagattcggtcattaggtttttcatatgactgggaccgtgaagtgaatacgactgatccaagttactacaagtggacgcagtggatctttgaacagctctataagaagggcttggcttacgaatctgaaacgttggtcaactgggctcctgatatgatgggtggaacggttgtttctaacgaagaagtggttgatggtaagacggaacgcggtggctatgatgtttaccgggtgccaatgaagcaatggagcctcaaaatcacggcctatgcggaccggttgattgatgacctggacgatattgattggccagaaaacatcaaagagcaacaacgtaactggattggccgctcagttggcgcatccattcgtttcaaggttgctggtcaacctgacgataccgagattgaagtgttctcaacgcggccagacacgctgtttggcgcaagttacatggtcttggcacctgaacacgacttagttgaacaattgacgacacccgaacaagcggacgctatcaaagcatacaaagctaaaatcgccagcaagtcagaccttgaacggactgatttgaataaggacaagaccggggtcttcactggtagctacggcatcaacccggttaatggtgaaaaactgccaatctggattgccgattacgttctggcttcatatggaactggggccatcatggcagtgcctgctcatgatgatcgggactttgaatttgcacaaaaatttgatttgccaatcaaacctgtcattgcgggtgataatgattatgaccaacaagcttacactggcgacggggaacacatcaactcaggttttgttgacggtttagctaagcaaccagctattgataagatgattgactggttaggtgaacaccatgccggtgaaaagaaggtcaactatcggttacgtgattggatcttctcacggcaacggtactggggcgaacctattccagttattcactgggaagacggcgaaacgacgctggttcctgaagatgaactaccattgcggttaccagcaactaagaacctggaaccatcaggaactggtgaaagcccgttagcgaatatcgacgactgggtaaatgtcgtcgatgaaaacggtcgtaaggggaagcgtgaaaccaacacgatgccacaatgggccgggagttcatggtacttcttgcgttacgttgatccgcacaaccgtgaagctttggccgattatgacaagttgaagtactggtcacccgttgacttatacgtgggcggtgcagaacacgcggtcttacatctgctttacgcacgtttctggcacaagttcttatatgacttaggcgttgtgccaaccaaggaaccattccagaagttagttaaccaagggatgattttgggtgataatcacgaaaagatgtctaagtcgcgggggaacgtggttaaccccgatgatattgttgaccaatatggtgccgatacgttgcggttatacgaaatgttcatgggaccattggaagcttcgattccgtggagtaccgatgggttacatggtgccaataagtggatcgaacgggtttggcgcttaatgatcgatgaaaacaatcgtgttcgcgaccgaatcacgactatcaatgatggtaagttgacgaaaatctacaacgaaaccgttaagaaagtcacggaagactatgaagctatgcgctttaacattgcgatttcacaaatgatggtcttcgtaaacgaagcatacaaggtcgacgatttaccaatcatttatatcgaaggctttgtgaagttactgtcaccgattgcaccacatttgtcggaagaactatggtcattattaggccatgatgacacgatcacctacgccacttggccaacgtatgacgaatctaagttagtagaagacacggtccaaatcgtgcttcaagttaatggtaaggttcgctcgcacgccgaagtcgctaaggatatgggcaaggatgaacttgaaaaactagccctggcggatgaaaaaatccaggaatttacggccggcaagacagttcgtaaagtgattgccattcctggtaaactggttaacgtggttgccaactaagtaccacgaccagtatcaacttaaatgaatatcgcttaaattaatcgtgatggtgactgacaattgttggttgctatcacgattttttaactactcacagaactaattagtgcggttacgattgatttggttaagtgaataaagattctgaggacgttctggttcggtttgggagacaaatcacacgtgtttttggtgggcagggcgtgtgcaaccgcctatgcttaacttaaaactagcagtaacgtggtttaatcagcggaaatggttatcatggcggcactctgctgtaatcgaatttgagaccgcatcgtggccgctggtaaagcgtacggattggtcttttttctgtatcagccatagggtatcggatggcggtacggttcgccaatagatggtgcagttgtcaagaccttatcattaaagttcggttaaactcacgcataaggccggaattgaattgcaacttgtttgtttttcatctaaaatgattaggattgaattaagaaagtgggttacgaacatgtctgaggaatcaaaagctaatcagccccggaatgcacacgtgaattctgaagccgaagcgcaccagaagatggtgcgcgggtcggcttggatgacggctgggagtctcttttcacgggtgctcggggcgatttatattatcccgtgggttatctggatgggcgctgattatacgcaaggtaacgcgctttatgccaagggatataatatttatagttttttcctgctaattgcgatcgggggaattccgtccgcaatttctaaacaactttccgaatataatgcgatgaatgaatatgccgttggacagcgcttattcaagcggggcttgttgttgacgtcagcctttgggattattggtgccattattttatggtttggtgctggcttgatttcaacagcttttgggggctatgatgccaatctgattcccgtcttgcatgcgttggctattgccttggtgattctgccatcgatgtctttgacccggggattcttccaagggtatcaacagatggcgccgtccgcaatctcacagttcgtggaacaagtttttcgggtcatctatatgttgggtgcgacgtatttcatcatgcgcgtcgctcacggcgattgggtgaatgccgtgacccaatcgacattcgcagcattcgtcggggcggctgccagcttcttattactcggttggtattatttccgcaaacggcccgagctaaatgccttagctgctcagagtgagaacaaactagttattccagtctggcaattgttccgcgatattattattcaggcgattccatttattgtgatcgataccgcgacgacagtcttcaacctgttggatcaagcaacgttccaaccgatgatgcggctggtttaccatttgggtactaagcagatcgatacgttgtatgcttactttgcatttaatgcgaacaaattggtgatgatcattgtgtcattggcgtctgcgattgccgtgacggtcgtgccgattttatctgaatcattggccagtcataatatgcgtaatattcgtaaacaattggaagattcgattattttattcctatttatcatgattcccggagcgctggggatggccgcagtggcacaaccacttaacacgctcttttatagttatgatcaaattgggaccttgattctgcagatctcagcatttaccgcgattgctttaggcttttttacggtgatttcggcgctgatgcaaggcctatcacgcaaccgcgatattattcgctattacttgatcggtttactggtcaaaatcgtgattcagttaccatgtatctatttcctatcaacggcggggcccctggttgcgaccgcgattgggatgatggttgcgagtctgatggcgatgtatgatttggaagtcaactttggaattcggtacgtgaagttattaccaaaaatcaatcgaattttagtttattcgattttaacgtacgtcacggcacgattagttgtttatgggctgaactttgtgttgaatgagcacagtaagacgcaatcgttcttgatcgtagccctagcagttatcgctggtggtgcggtttacgtttacttagcactccgttcacggatggctgatttgatgattggaacgaaagctgctgggttacgacggaaattacggattaaataggtgaattatgcgagtagataaatttttacatgcgatgcgaattggcacgcggactcaagtacgtcgtctgattaaagatggtcatatcactgccaatggtgagccagtaatttctggcaaacaacagatcaaccctggcagtgacaccgtctttttagatgacgtgcaggtccgttaccaacaatacttctattatgtgatgaataagccagtcggggtcatcacggcaacgacggattccgctgcgaaaacggtgatggacctgttcaatacgacggattttcgtgacgatctatttcccgtgggtcgtctcgataaagatactgagggaatcttggtcattacgaacgatggggccctatcgcacgacctattgtcgccgaaccaccatgttacgaaggtctatgaggctgaagtaacgggggaaatcactgcagctcaattggctaattttaatgatgggatcacgttaaaggacgggactgaattgcaaccggctcaggctgagattgttcaattccatgaaatcgagaactttaccacgattcgaatcatgatccatgaaggcaagtatcaccaagttaagcggatggtcggaacgttaggtgaacgggtcgtcgggttacggcgaatcaagtttggttcgttaacgctacccgttggcttattagcggggaactatcgtgcgctgactgatgacgaactaacagcgttgaaggcggatgcgaaccaacccgtaggcgaatagtgcgtgttacgaattcggccactctggtttaaactaaatcattaagccccaactaactatgaattcaagcatggttagttgaggcttttttagcataatgtcgttggcttgttcgtgttcattatggtccagctagctaagggcgttcaatctgactaaagcggtgcatgtaagtcggaatgcgggtactgatttgatgcggcaagactacgtaccgcgttgcagcgaggtcatcggcaatggcactgtgcaagtagaccgcgctgagaacggcatcggtgaaattatgaaattgacttacgaagctaccaatcataccagccaacgtgtcacccatgccgccggtcgccatggccggagtgccgccggggttgaaccagactcgttcgtcagtgtagacggtcgtgcgatgagctttgaccacggccgtaacacctaaccgttgttgcgcgtcatgattggcagttggggtttgatctttgatcgcgataccgctaagtcgttgccattccatttggtgtggcgtgaccacgatgtccgtggcgggtaaggggcgggcctgctgtgcaagcaaggtcagcgccgaaccatcgatgaccaatcgttgtgggacgtgcgtcgcagcgagaacggcggtcagtaactgatcagcgacggtatctgttccaaggcctggaccgatgacgataacgtccattcctgccagcaggtttaataaggtgtccgtttggtgatagtcaatgaccatggcttcgggtagccgagcatgtagactcgtgaaattagacgggtcggtagcgaccgtcaccagaccggcaccactatatgttgcggccgttgcggccatgatgatagcaccaccaaaattttgattacccccaatcagcatgattcggccgtaattgcctttgtgagaatcagccggtcgtttgataatcgttcggctaacaatttcagttgtaataggttgcataaaatgaccagctttctaagttaatttactttgagtataccattttccaaaagcggttacttacgattattaagttgacgacagctatgataaaattgaggtaacaatatgtgggaggaatttaacatgtcagttgattggaaaaatgaagcaactaagcatcaagatgattatttagcagatttaaccaccatgctccgcgtaccgagctttcgtgacgatagccaggcgacggatgatgcacccttaggccctggtcctaagcaagcgttaaccacgtttttagcgattgcggaacgcgatggctttaagaccaagaacattgataacttggtcggttatgctgaaattggtgagggggatgaaaccttggcaattttagcccatgtggatgaaatgcctgctggtaacggctgggatacggaccccttcgaaccaaccatcaaggatggcaagatgtatgcccgcggcgtttccgacgataaaggcccgggaatggcggcctactatggcttaaagattgtcaaagaacttggcttgaagctcaataagaagattcgctttatcgttgggacagatgaggaaagtaattggactggaatgaaacgctactttgaagttgaaccagcgccaaccttgggcttctctccagatgccatgttcccgttgatcaatggtgaaaagggaaatgtgagtctgcaattacacttcggtcatgaagataatggcgactttaaccttgtttcttttgattctggcttgcgtgaaaatatggtgccgcgtgatgccgaagccgtggtcgcgacggatgacaacgagcagttggcggccgacttcacagcgtttttggaccagcaaccagtaactggtgaattaacggtcgttcctgaaggcgttaagctggaagttgttggaaaggccgcccatgggatggaaccacgtaacgggatcaatgccggaacctaccttgcaacgttcttgactaactatgcctttgctgatgatgccgctgctttcttagacttcgtggctaataagctacacgatgattcacgggcgaaccagttaggcttagcttacaaggatgacgttatgggtgatttgacgatgaatgtcgggttactcagcttcgaccatcaaaagggtggtgcgttaacgttgaacttccgttatccgaagggaatcgaacctgctgatttaacggcgaaagtccaagcacagttaccagctggtgccacggtcacgcagggtgacttcatggtgccacattacgttgaccctgaagacccgatcgtcaaggatttgatggacgtttaccggcgtcaaactggtgacacggcctcacaaccacaaattgttggtggtgggacttatggccggatgatggctcgtggggttgcctttggggcactcttcccagataccgaagatacgatgcaccaagccaatgaattccaaccaattgacgaattaatggctgcaatggcgatttacgctgaatcaattgccgtgttagcaaccgacaaatagtgatcctttaatggagggtgatggttatgacgatggttaaacgcattttagtcggcatcgatacgagtcctcagtcccaattagctttaacgaaagcaattaagatcgcggtcgagcaaaatgccgctttggatattgtgacggtcattaatactgagaaatttattggtgtgactcaagggccgatgggttttggcgcaacgacaccgcaggcattgaacgaattgacggccggtcttaaagcgaatctcgctaaggctcgccaacaagcgatggccgcgggtgccagcgatgtgcgggttcacttacattcaggtaattcgaagttattgttagcgacgactttaccagaccgctatggcactgacttgatcgttgttggggccacaggtcttaacaacgtggcacgggtgttaattggctctaatgctgcttatgtgattcgcaatgctacctgtgacacgttggtggtgcgcacagatgctgatcaacagccagtcaaactgccaaagcataccactcgtcggctttgattgaaatttttaggacatccgatagtgtgtccagataaacatttgagcggctttttcaagctcgatatcggacacagagaaaaccgactcacggtggaccgttatcatccatgacagattaactggtaggacacagactaaatagttgtttcgagaatgtacaaattcttgaaacaactattttttattcactccgaatttgttggtggggcgctgtttatgaaaaaaatacataacccatacgttatttttacattatgccaacattcccgatacgttggtctggcatgattaaagagtaatctaataaattacaaataaaaggtcgaggggatatgaatatgggaattaccttgcagaacatcacaaagacgtatgataaggcgaaacagccagttttaaacgatgtaaatgctgagattcaagacggggagttattcgtgattgttgggccatccggttgtggtaaaagtacgctgctgcggatgattgccggtattattccaattactagtggaaagctggccatcaatggtcagatcatgaatgcagtcccaccaaaagatcgaaagctgtcaatggtttttcaaagttatgccttgtacccttttttggacgtggctgccaacgttgcgtttggtttacaagcacgaaaaatgccggccgcggaagtcgagcgtcgggtcaatgccgcgttgaagatggtcaatttgacggcttatcgtgaccgcaagccgcgtgaactatctggtggtcaacggcaacgagtggctttggctcgggcgattgccagtgatgctaaggtttgcctgatggacgaaccgttatcaaaccttgatgcgcaactacgcgtgcgaatgcggaccgaaattcgcgaactgcaacgtaagctcggattgacattgatttatgtcacccatgaccaaactgaagcgatgaccatggccgatcacgtaatggtgttaaatgagcgtcacgtgcagcagattgatacaccgttagatatttataatcatcctgctaatcatttcgtcgctgaattcttcggtacgccacagattaatttactgccagtggtgacgaaaaccgctcgtaatttacacgtcgcggagggctttcagattgcgcttaaccaaccattaaacgcggggagctatacgattggtatccgacctaatcagctaaacgtagtaccagttactgatgagcgcggtaatggcaaggtcacgaatgtcgagacactgggcgagatgacgattatcgaagtgcaggctgataacgggacggcattgcgagttgcacaatctggtcaggtccaattaccacttgaacaacgggtgaatgtaaccgttaatggtaagatcttcatttttgatgagcacgaacaactgattgctgaagaggagggtgttactagtgatcaactcgtttccgtcgattaagcgacgccttaagccgaaacaatcgccagatgcgcatgaccaagcaactgtgcagaccggcagttttgaattaaagcgtaatgataaatattatgcttggctatttcttgggccctcaatactcgccctcagtgtttttgttttctatccaatgttacgcaccttgtatctaagctttttcttgactaatagtcttggtgaaccaaccgtctttgttggtttgcaaaattaccttaatttgctgacgactaagagttatcttgctagtctgcaagccactggaatctatgtcgtgggtgtgacggtgttcacgttaattggggggttactgttagcggccgctgccaatcaaagggttcggggtatcgagctatttcgaactatgtttacctcgactatgggagtgtctgtctcggtctccgcaattttctggttattcatgtttaatccatccgtgggcttgttgaataaggtggccatctggatgcacttaccggcaattaattggttaacggagccacactgggccatggtggcgattattatgacgagcgtttggatgcacctcggatttacttttctgatcttttttggggcattgcaagttgtgcctaaaaccttatatgatgcggccgatgtggcggggaccagtcggcgttatcagttcatccatatcacgttgccaatgatttcccccacactcttctttgcggcggtgattacgttgatctcagcgttcaagagtttcggattgattgacttgatgactgcgggtgggcctacgaacgccaccaacttattagtttaccgtatttatcgggatgccttcgttgatggtaactatgcgcttgctagcacggaatcgatcatactagcaatcattattgcagcgattacggtaatccaattcaaacttttagcaaagcgggtgcattactaatggaaaatacaatggctactcaagccctgattcgacatcgaatcggtatcggattccggtacttgttattaattacattaacgttagtcattattttaccgtttgttttagggttgtggaccagctttttaccaacgacgactattgcgaaaggatcactgagcggaaccctttcttggcagaactatcaggatgcgtttaccaaaacacccattcttcgctacttatttaacagtttagtgatttcaatcattcagatgattgctcatctgttttttgcatcaattgccgcctacgcctttgtgtttttagaatttaagtatcgggatgcgttgttctacttggtcttggcaactatgatgctaccatttgaagctgaagtgattccgaactttcacacggtccgtgcgatgcacttgttgaatcactatgcggtgatggttatcccgttcttaacttcggcctttggtatcttcatgttacgtcaagcctttctgcaaattccacgagacttaaaggaagccgctgatgttgatggtctctcacactggcaattttactgtcgcgttgccttaccatactcacggattagtttattgacgctagctgcttacagctttttaggaagctggaaccaatatttatggccaatgctgaccacgttctcaaatcggctacgcccggtccaagatggattgcggcaattgcattcggaggaaaccgctacgaattggggactcgttcaggcgagtgccgccatcgtggtgattccaacattgattgtccttttctgggggcaacactactttaaatctggattgaatgaaggttcggtgaaatgatgaagataatgcgaaagtggcagtggctagccggtatgatggttgtcctcttggtagtgggtggggtcgcttatagtcggacccgtgtccatgcggatagtagtcgcattaaagtggtgttttggcatgagatgaaaggtcctggtcaacaagcgattgacgcctacgttaaagcgtttaatcaccaacagtccaaatatgaagttgtagccgagtttgagggtggctataatggcgtcattcaaaaaatcttgaatacgcatgggacggccgcgtcaccagcgctatttcaatcgatggatatttccaccagtcagatgtatcacagtggtttcacgacaccgatgcagaaatttattgaccgtgaccattacgatgctgatcaaatcattccgggcgccaaggcgatcgtgatgcgcgacaatcaattgctagcaatgccgtttaatgcatcgcaaacggcgctttattataataagagggtcttgcgtcagtacgggattacgccgccaccagtggatccgacttatgatgatatcacgcgagtcgctaaggccatccacgacaaatcccacggcaaagtcaagggaatgacaatggaggcctattcgtggctattcgagcagctggtcgctaacgcaggtgttcccgttgccaatcgtgataatggtcatactggcaatgcgactaaggtcgactttacgagtcccgcggcgatcaatgcgatgaagtgggttaaagaaaatattgactatggtgactttatgaactttggttcgggtggtaatgctgctgcaaatgaagcagcctctttcttggcaggccatttgggtatcttcatgcaatcgtccgcgaacacgggtcagttgtatcaagtgctcaaaaatgatctaggtgtcacatatttcccacggccgaatggtcagaaagccaacggaatcgcagttggtggggcggcactttggattgcgaacgacaaaccaagcgcggtccaagatggcgcgtgggaattcactaagtttctcgctagcgcacagacgcaagccgattggcaagccaagactggttatttagccgttaataagggggctaaggacgagccaacgctgaaaaaactattcaagaagtcgccggtcctagaagtttctggtaatcagatgctacgaacgaagcctaataatacgaactcaggtgtctttgtcgatggttgggttcccgcacggacggcgattcaaacggcgatgcagcagatttttgcaggccaagatattcgacaatcgttgcaaacggctgaaaatacgtacaataaagtgttagaatcaaataaccgtgcaaacggtcgtcattaattggaaagagttgaagaattgtgccaaatatgtcgttgatttatggtcatcggggcgttcccgttaagtttcctgagaattcgctagctgggtttgcgtatgccatcagtcatcatatcgatggcttagagtttgacgtccatcttacccaggatcaaataccagtgattatgcatgacgaacgaatcgatcgaactactaatgggcaaggggccattgcggatctgaccttcgaacagttgcgtagatttgaattagcaaatggagagcccgttcacttgaaccttgagttgaagactgatcgacactattatcttgatatcgagcggattgtgctacggatggtccggcagactgacttaatttatccggtcgttttttcgtcgtttaatctgaagagcttacagcgggcctacgccattgatgccagccagaaatatgcttttttgacttcggcgcgtctgggtaatccggatgagtttgcgactcacgaacacttagaaggggtgcatcttgagcactatcaacctgtacaccatgttgctgaacgggtttggacagtggatgagccaatcgtaatgcaacaattgttcgcagcctcggtcaatgcggtgattaccaataactttgagttagcccaacaagtccgggcagccatgtaatcgagcgcaattgtgctagtgcggcattcaaagattgtcgtttggtaatgcgacactacccgcgctacctagttagctggtcgcgagtcattaagaagtttctgtattgtttgctcgctagattgtgcgcaataaaagcgccagtcccgataatggggactggcgcttttagcatgattaattaaactgtggttggattgcgaatcttgcctaattcagaatcgatttgagccagcactgcttgttggttagcaggtttttccaagtcgtactgttgtaaatcaatcttcattttagggctagcatcgtattcatcgtaccatttccgataagcggtccacatcttatagtaataagattccagttcagggttgtggtcgaactgttcgtagtcgcgaccacgcttcttgatccggtaaagaatcgtatcgaagtcagtttcagagtagaccatcaagtctggtgccttcttaggcagttcagtcaattcggtcatcatattgtctagtagttgcaagtaaacattcaattcagtatcagagatgtttccttcagcgttgttttctttggtgaagagggcatcttcatagatggagcggtcgaggacgttgttatcgtcggccaatgccttcttgatcattgcaaaacgtttgttgaggaaatagatttgtaataggaacccgtaattcttaggatccgaataataaagtggcaatacggggttgtcgccaaccggttcgtaaaatgccttagttccaaggtggtcagcaattaaccccgttaacgtggttttgccgaccccaatcattcctgctgttattatcaccatgatagcccctctttataaaaaattgcacaatatattgtatctcaaaaaaagttttaataccatatagacttttaatgaaaaatttgcttgggagctattttcatttattttttagcctgttcctttaataaatcacgaatttcttctagatattgcgcggaaacatcgacttcttcttcctcgggttcttctggttcatttttaaccactttattaataattttcaccagaatgaaaacgacgatggcgacgatgaagaaattaatgatggcatttagaaaggacccgtacttaaaagtagcatcaccgatactgaactttagattggataaatcaacttttcctaagaaaatcccaatcagtggattaattaagttgtctgtcaacgatttaacaatggccgtaaaagcggacccaataataaccccaacggccaaatcaatcacgttaccgcgggcaataaattccttgaattctttgatcatgcgactcgcactcctttattaattgactgttaacagtatagccaaaatcaaacgctgactcaatcaatataccaatctaatttaaccgtaagcttgtccctaactaaagcatacccatactaatttgaggtggtatcatgattagttttgtttggatagtgacttaatgttgttctgaatgattgttgtggtgcatttgagactagttaatggttttagctagttgggctgttgactgacaagttaggtgacttagcgtgtgtgacatccggtcaaaatgagtctgtgaaaagcagtctcaagtgatggggaagtcgtttcaatattagtagggattttcacgaatactaataatatggtagtaggttaaggtgttgaccagcgaatcagaattaacagcaccatttgggtaaagtcgtcaacttagttagctgctaaaaacgactctctctgatatagagaaagtcgttttggcagtgtttcgagatcataaatccaaataactaattcgtcttattgtcagatgctttagcttgagcctttcgccgaaccaacgtggctaacttactctgagtggctttgacggcgacggggtcttcaaagtcaatttgagccagccgagggtaacgacggataaagaacaaccaggtcagagcaataaacagcattagaatcagtgctaagacgcccatctcaggaagagcagaattaccagtcattaaggtctgccgcaagccgttgacgctgtaactcattggtaaccacgggtggattgtttggaaaaagtgacctgacagctgaattggatacgttccggctgaaccaccgagctgtaagactagtagtaccatactgaagaaggcgccagctttgccgaagacaaggttaagccaagcgacgatcgtcatgaagagtagcgccgttagcgtgagtaacaaccaagtggcaaacggatgaatcgggctgagtccgttgattaacatcatcaagccgagcataatcgtactttccatgattgaaaagacgagcatgatgctggccttgctactccaccaatccagtgccgattgcgggtgtttgcgtggggtatacatatcaaacatcatattgagggcgagcgcgccgacaaataacgagacacttaacatatacggcgccataccagtaccgttgtttggtacatcatcacggtcctggtgagttgtagtgacgggtttggcaacttgttgatacgtcagttttgatggattgagattccccttgcttgcggccgttcctaatttggtcgctaatgcttggttaccagtttgaatcttattaccagcggttgtaacttggttagcacccacggctagttgctgagctccggtggctaattgcccattgccactagtgagttgctgactgccattagcgagtgcaatacccgttgtgccgagtcgatgtaagccagtggtgacttgttgactgcccgtaactaactgtgagatgccagttgttaagctgggtaggttggtctgtgcagattgaagacccgtagccacgcggctggcaccttgtgttagctggttgccctgggtgctgagttgacgcgtgcccgcggtcagctgttgagaacccgcggcaacttgccccgcacccgtagccagttggtgacttctctgattgagcaagttggtgttagcatccagtgttttaaagccttgggtgagctgctggctattagttgtgagcgttgttgttccgctagccaagtttgtcgcaccagtagtgacggccccaatgccattagtgagattaggtaggaccgtgttcagctgggttagactagtactcagtttgttagccgcgttaccagcagattgaataccggtcgtcagtgattgcgcaccggtagtgagttgggtgaccgtggtgacaaggtcagcctgctgttgagtcgtggcgctgagggccctagtcaaagcagtcgtatctagagccggttgcgtcgactgggcgatggccgtggttaaactcgcaagggcggcgttgatggcgtcacggttagcggattgatcaaccgttgccaaaatggctgatttttgtgccgcagtcaaattttgactgttagcggttgcggcgacattgtcgtgaagcgccgcactagttttaatagccgatgtcagcgcacttagcgcggttttaacggacgataagtcggtaccagcagcctgctttttcagcgctgccacggttgcgctaatcgtggcttgattgttggttggttgcttaagttgcgtctgcaatttttgcaagtcgatggtgagggactgactgttctgacctagtgtctggatgccagtagttagctgacttgagccgctcgttagggccgtcgttttagccgttaactgagcggtctgtgcttgtagttgattagcaccttgactaagcttgttggcaccagtgttgaccttgccgacaccggccgcataagcgtttaaaccggaactaagttgttgcgtaccagtcgccagttgagcggtaccactactgaattgttgcgtgccactggccacctgatgggcaccagtattgactttgacagtcccagtattcactcgctgggcgccagcaacgtattgatcaacaccttgatttaaagtttgaaccccggtgttgagttgagccatgccagcaactaactgattacttttgacgagcagttgtgttagaccggcaactactttttggttacccacctgtagttgtgaaatgccattaagatattggtttaaaccgaccgtcagtgtttgactcccttgttttagtttcagcgaactagttgcgagggtgtccaggttggtggcgattttttggttggcagtttggagctgctgaccaccggtggctagcttttgattattagtagcagctgttttgaggccactgtcaagttgtttgatagcggcaaacatcgttttggcatagctcgttgtaatcgtttgggcgacggatgaccgaatcgaagtgaccgctgaatcggccatcttgctagcgacgaagttatgtccagcacttgtatcataatgtagcaccatggcttgtggttggtgattgagtaaggtggtcgcgtggcgcgaaaaattggttggaatcgtgagcaccatataatagcggccatttttcaagccagcttgtgcctgacttgcgttgacttgttgaaacttcaaagcgctagatttttttaaattcgttgttaaattgcgtccaacactgagatgcttcccttggtacgtgactggctgatcatgattgacgacggctacaggtaaattatttaaccgaccgtatggatcccacattgatcgtaaaaatgtcacggcataaattgatggaatgaacataatgattgccatgacgataatcattagtttgtgtttgcgcatatacgcccattctgctttaatcatctttacttgcgctcccttaattgtctattttgtatgaaaccccgtgtgtgcattaaagaggataacaggtttcagaaatagcaccacatcatcaagacagcatgtggggtttaaaccccattttgagtgcaagtggggtttaaaattaagggtaagttatgattttaaaaatattatgggtatacatagcatgaattgagctgtcatcaattatgataaaaatgtgttagttaggttactggtcatcagtaaatgtgcgtcctacatacaccttctaggctgagcggcaattgctataacatagccaacatcgattcggctgcgggattgtccgaacgtggaaaagaagccccttaccatgatatttcaaagtaaggggcttggtatgagataagcagttaagatttccagacaattagttcatctggtttgaagtagagttgttggctaacaccaaaccgaactaagtattgatctttagctgcgtagtaggcaatgatcgttcccacaattcccaaatatggttttggtaacttgacggttgttccgatttttaaagttgacatgattgaaaacctcctaaattttagtcattatcaaggccgtgacgacggtaggcatagaagaagatgccacaggtaatcacgagccatccgagttgcgtcagtacctcacgaagcgtccatgaaaaaccattagtggcatatgaggcggtaatatagtgattaatcgtgctggtataaagatagctactaatggttttaagggtggtattgaactgttcgaaattcggtatcaggcttaaaatcagcatcattggaatactgtagacgcctgcttgagtttgactattagcaatcagaccaataatgtatccgagcacgagactcgttaaactagtgataatagtaatcaataaaaagtttcttaagtgaatttgcgaccaactggcgccgcttagggggaccagtatcaaattggttacagtcataatagctagtggtggcaataaactaccgataaaaaattcgggcccggtaatggaagaggtcattaggacacgtaacgtatggtgttctttttcttcggctaagggataactcgtcatcatgatgccacccataacgatattaaagcatagtcccattcccagtaatagggaaatcagggcgacgtgtgatggtgctttactttgcataatactcttcatgaaaacgacgtacaaaatggccatgattggggcagtcattagactcatatttgaaatgatcagtcttaatttaagaccgaataaggcttttattttggttactgataaactcattttaggctccttccagttacggttaaaaagacatcttcaagggtcggctcgcacgagtgaatcgtctcaagttgcccagaaagcatccactgattaatctgataggtcgtctcaggagatgcggggagtaacaaatcttgcgctgccgatgcaatgtggacgcgatactgctggtcgcgattatattttaattgcaatgcttgtggggctgcacattctgcgatgcggccagcgttgagtaaggcgacacgattgcagagacgagtggcttccagcatatcatgagtcgttagcagaatcgctgtaccctggtcgcgtaattccctaatcagtgcgtgaattgcttgggtcgtgcggggatctaaaccactggttggctcatcgaggaacaagacttgcggttggtgaagaattgctcgggccagaactagccgttgacgcataccttgagataacttaccagcgagttttttcttatgttgactgagaccaactcgttcaagtaacttatcaacacgtgcaaccgggacaccaaacattttcgcgaagaatagtaggttttggtataccgataatttgtcgtaaagcccactttgatgcgtgacgatgccgattttttcatagcggtgttcgtcgtatgcttggacagactgacccaggacgtaggcttcaccgttcgttggtaataattgtccggttagaattttaatggtggttgtttttcccgatcccgagggacctaaaaagccaaaaatttcacctggctggacggtaaaactaacttggtccagcgcggtcgtattttgaaatgatttggcaatgttaatcacttcgattgcattttttattgtcatcgttgatcgctgactcctttaaatttgatttggaagcgtagtggcttctacaaaatctagtttactggagcaatcgtcgaatgtgattaaatcaaggtgtaatggggcatattggggccgaatggtgcattatttaggctgaatggtgtcctaaaaattgatcaaagcttttaaatcagtgagtttaccgcgagagaggggcagtttacttttgtttttcaagattaacgtgtaactatttcgggagtaactgattagttccgcgatttgttgtaaattaaccaagtaagaacgatgacagcgaaagaagccgagcgtcgtcaattgttgttctaattcgctcattgtttgcgatgatgtgaattgttcgccactgacgttcagttgactgaccccgttgacactttcaataaaatcgatctcgttagggctgaaaaagactgttttatcttcaaccttgcttgcaattttaaaaattggtctaggtgtatcttctgaagtgtgtgcggaatcggaactgctttcggtcgccaaatcagtcaactcgaggccctggtttggtcgataacgaaagatagtcgtactggttaggacaagttcttctaatgagtaggaggtcagcagtacggtgacgccgtgttcgcgagtataggctaaggctgctaagtacagctcaatgccagcgttggtcaagttggtcaggggactttcaattagcaacaagtccggttgtaggatgaatgcccgcagtaaggccagacgttgttgttgatcaaaggataagtgcttgatcttagtatgggcgacgtctttgagtgcgaaatactgcaaaatgtcatccaggtccgtctcaaaggtgctgatgtgttgaaaggtcttcaaataagtcgagactgttaattgcggataaaagccgtcatcatgaaagatggcttggatacgtgcgggagtgaggccagtcatcacgccactagtttggggtgtcgtttggcgtaataggttaaagagggtcgttgcctcaacgtggctcatctgaatgccgatgttactttgcgctggaatggtgagtgtgaaatcttttaaaatcgtttggtgtgcttgttgtttaaagatgttgcttaactgaattgtttgcatggtgagaacctcgttgtttttagtgtttgcgtgaggtggctagaaaaaggccatagcactcagacagattggcaaatctgatgtagacagtaataatataccatatcgaagtaggcagttgtggtttgtcctgattgagaccgttatgtcaaactgaaagctgacatgctgcaaaataccgcaataaaaacaggacaatggacggccgtcattcgtatggcgggtcaatatcctgttttttaaaattaatgtttgatgattgaatgactaacgagattgatcaagtggtcataaaacacttggtcaattgataataatagcaatatcagaaatggccaaccaaacggtctctgtgggtgattataagcaattactggcatcactgttaagcccatgtggatgaaacttcctaataaaatcagccacaagctgattagggcccattgcgatttttgccgcatgtttatgcgcctccataacaattaagtatggcacagcgattagtgcttaaccaattgattccagaagcaggcaaagtcataagttgtgactgaaccgccaagttagaatttgtttttgaatttcaaccaaattagatagtgatcatgggcttttttcagttgtcggtagcgccggggttgtttgcggtaaaaatcctgatgataattttctgctggccaaaattgctgtaagggctcaatggccacgacaattggtttttgataacgttgcgagtccacaagcgcttgtttggatgcttgtgcaatggtcaattgatgttgattagcataaaaaatgactggccggtattgactaccgcgatcattgatttgtccaaagcggtcggtcggatcaattagttgccaataaatatcgacaagattttgatacgagattttacgggaatcgtatctgatttccacggcttcaacgtgccccgtatattgaccaataacttgttcataggtcggttgggcccacgaaccaccggtataaccagaaatcacattattaataccgggacgctgatcaaagggctcaaccatgcaccaaaagcacccaccagcaaagactgcccgttcttcataaggcgaactaaggggtgggtaagccgatacattgtttttagtcggcatgggtgcgttgccagtgatggcaagataaaagtccataacatccggggtcaagttattccgcatagctaatggtcgcaaatcagcttcgagctgttttagttgcccagtcggcgatagctgttgccgattattcttggcctggactagtaaatggcgttcccagtcacgcgtcgccgggttgatgattaaattgtataagtcgcgcattaaggcttcaggttttgttttcatggtgtctccttaactggcttatttgccgagtattagcacgtacttgcattttggctgatttgattttagcacggtgctttggtagcacataatgttatgatttgttttctatcaccctgtcgtaagctactctaacaagaaatgcaaccagatgatattgatgtgatcgttagttgcatcttagttataagcaccgtttggccgacgtcaaaaatggcggctattattgtgggtattattcacccaagtccaatttgattggaaaagcttgctatgaagtatggttgatagtttataatgaatcgcatgcgaaaaaaggaggaactaaaattggatgatgaagtcgccaaatatacaacccaagagatttcagtattagttgggatgagtgtctctcaggtccattactatgatcgcctgggcctaattcctaatctaagacgatctgagaatgggtatcgtgtttttacggaaaagaatctgatttggatgaaaaatttgaagatttttattgattccgaaatgccgttgaaggatattcgtcaactaactgatttagttgttcaaggcaagcaagcaacagcggaaaagcgtcaagcgattgttgaacatcatctgaaagaattagagaaaaaacaggctgaacttaagaaacaggtcgcattcatgaacgggtttattaaaacatatcagcaaatggaaaaggagtccgatgaacgatgaatacagttttagttattggtgcaacttcgccaactgcccaggccttcattaaattaatggaacgtgattatccagaaatgactttaaaattatttgttcgtaatcgcaaaaaggtccctgcctatcagaaacgagaacatgttatttttctgggagatgcagcgaaatatactgattatgtagcggcactcgaggatgtcgattatatttatgattccgttggtgggctgagcactggtccgtacgttaagttattgttacgtgcaattaaggaaacacaggcaacaattaaacgaatagtcgatatttcggcaggcggtatttacggtgaatatttgtctggtaatttaccctatttatcggctgttcgcacgcaacatcctcagtatacccatgatcagttagacaaaccgttgttatttgcaaatagtggtattccctttacaatctttagaccaggactaattcagaatggacccgaaacaaaaattattacgcacggtcctgaatttagagcgataccggagtctgaatttgcaattaatcgagatacgtttgctagggcagcagccaatgccttatttaatgatgactaccacaatcaaagtgttgctatttctaatggtgaactattatagaggagaaacttttgtatgaagcgtttagttggaactctgtgcggtattattagtgccgctttatttgggctaggtggaatactagcacagcctttgttaagtgagcaagttctgactccgcaacagattgtattgttacggctgttaatcggtggggcaatgttgttgctatatcgtaacttgtttttcaagcaggctagaaaaagcacgaaaaagatttggacacattggcgaattttaacacgaattatgatatacggcatcgccggcttgtgcacggcacaaattgcctttttttctgcgattaattacagtaatgcagcagttgcaactgtctttcagtccactagtccgtttattctgcttgtatttaccgcgctgaaagcgaaaagacttcccagtttattagcaggaatgagcttaataagcgcattgatgggaatctggcttattgttgaatccggatttaagaccggattaataaaaccggaagcaattatttttggcctgattgcggctatcggggttatcttatacaccaaactacctgttccattgttaaaccaaattgccgcagtggatattttgggatgggcactagttattggcggtgtgatagcgttgattcacacaccgttaccaaatttagttagattttcaaaaacgcagcttttagcggttcttatcattgttattctagccaccgttgttgcgtatgatctttatttagaaagtttaaagctaatagacggatttctggcaactatgactggactatttgaaccaataagttccgtactttttggcatgttattcttgcaccaaatcttagttcctcaggccttggttggtattatattggttgtgggtgcaattatgatactgaatttacctcaccatatcacggcacctgttcccagcaaaccctgtcaatgtacgatgcctaatcagtagggaatgataagcaatcaataatatcaaaagtactggctttaacaacatattgaagaaatactgccaattaaaacatcggtactgcgattaccttttcgtaatcatataaagctattgttttttgaaagttgggtcattgagcacagtaattgattgtttcagttttagaaattgattcttagcaggtcgcatttttgaaatgtcttaacaaacgactaagttaaatttcacaaatggctgtagcacctataattgcacgctgtgctaaaaactgcgcgtatgtatggataaacattgagatttcaacgcaaaaataaagcggttgcatttccgcacgtctttcgctagagtggaatagtaaacctaaaatgaccaagtttcagatggtcaagcggatgagagggaactttaatatgtataaaatgattgtttgtgacttggatgagaccctgatgaatgacaatggtacgttgtcagaaaagaatgcggcggcaattcaagctgcggcggctaagggtgtttattttgtgccgaattctggtcgtagttatacctcgtttcagaacgatttggagacgatgggattgcgggaccaaccacatcaatattcgatttcttataatggtggtttgattttagagaataaggataatcggccattggcggtgaatgccatgccatatgaggttgctaaaggggtgtttgaagcgggaattgcgaatcagcaggcggcgacgcatgtgtacacgcaggatacgttatatatttacaatccggttccaagtgattcagattatctacaaaaccggggcgtgacgttcacaactatgacgacgccggactttgaacaattcaaaacgatgaacgtcatgaagattattatggccttgccaacgatgactgaccgcaagcaaatgcgcgcagacgttgaagctattgttgatccaagcaaattagccgtcacttattcgtccgaccgttacgttgagtttaatccggctggcgttgacaaggggaccgcagcggttcaattaggaaagctactgggaattacggcggatgaaattattgcagctggcgataacagcaatgatctccccatgctgaaggcggtcggattgcctgtgagtgtcgccaatggtatcgatgcagtcaaggccgcagctaagtacgtgacggtcgctgataacaaccatgacgcgttagcagaggttattaacaagtttattttatagtacaaattttatttagaaaatgaaagttgccatttggcgttcaacttttacaagtggtatcatgataattgaaaatgtggtagtatgaaataaattatttgttacaaattactgaatgggggaacacgcatgagtgcgattcgcgacgatttagctaaagcgattaagaataccaacctcgttgaaatctattccaagggaaccaatgagcaatttagtgttggctatgtgattcagcaggatgagaagtttgtgctggtccaagccgttaatgtcgatggtgaactagatgggttagtggtctttcgtaaggcatcgttagcccgcgtaattagtgacactgattatttgaagagcatggcgacgatcattgcgctggctaagcaacggggctattatgatgtttggaacactgaacgattgatgaataagctgctgaagaagcagaataagactaaacattcgctcttaaaaacattgttgaagcaagcttttcaccacgatcaagtgattcaactatctggtcgaatcaaaaaacatggtgacagctatgctggctttattcatagtgaacataagaaatatattgaatttaattatgttgatatgttcgatcttgccaagcgcccacaaattgccattcgctacgctgaaattgatgaggccagtttccatagttttgaaacctttaatacaaccgcggttatcgagagttttatgccgggtgattttcactaataatgatctgtgagcggcaccgttaatgaacgggggtcgctttttttataccgtcgatcatgtgtgtcttttaagataataaaggcgagtatagcaagttttgaagacggttacgggtattaattggtcagtcagcgatttggtaaagattgttaagtttttatcgcacaaatatacaaactggccgtttgctacaatggtagtatttcgctacaatggtagtattgagcatcatgcggggaggggagcagttatcgtttacgtctattggtatattgcagcttttgaccattggtactcggtcatgctggtttttttactgcagatattaatcaatcgtgagcttcgacagaagcgagtctatgcgactgttgcggttatgaccgtacttctaactgtgatctacatgttgtatgacgactattcggatatcatcacgttcattgtgaacatggggttactggcgtttgtacggcgcaaaaagtactttattgtgacgagtctaacggccacactcgcctacattctttttagtttctttggcaattatgcgacggagtcgatttttcacttattcaacttgggtttgaatgactggagtggctggctatttgaagccatcggtgaaacaattgtcacagcttgtatgttggcagtcgccgctagtttcaaggtcttaaagaagcgttatccgcggcaatttgtagacgggctaacgttgaacgtgattgtcagtgctttggctgtagttgcggtcgcgttttttaccatcacgactgcggcggataattataatattggctcaggatttttggggattctaatgttgattctagtggctatcttgctgatcaacgccggaacgtttctttacctgttctatagttatacattgcgggttcaaaataaccggcaagctttggaacggcaacaatatgatatttatgtcaaaaatttggaaaatagttatcaaaatttacgtaagtttcgccatgattatcaaaacatcttactgtccttgggtgagtatattcagacagctgatgatcctgaattacaacaatattttcgtcaagttgtgaccaagtctaagcaaagtctaaatcgtgattttggacactttgacaatttagaacaaatcaaggacaaaccattgaaagccattattcagagtaagttttccgttgcgcgccaagctggaattcaagtacgcttggaagccaacgacccgattgcggcaattgcaattgattcagtgacgttatcacgggtgagtggcatcttgttagacaatgccatcgaagcggtgaagggtcagagtggtggtcagattgcggtcgcacttgttaagtatccccgcatggtggagttgatttttgccaattcattgaatcatccgattgagcgcctggatgagctgatggttgctgggcatacttcgaaaggtgctggtcatgggcaagggttagcaaccgttcgtgagttgttagatccattagctaacgtgacttatgaagtgagctcccatcaacgattcgaatttattattagtattgaaagtgagtgagcagcgtgttaaagacctttgttgtggaagacgatcctgaacaattagcaaccttaaagcaaatcattaagaatcatattatgattaatgattttgatatggaactgaccttagcaaccggacaagcacaaacgttgttggactatgtcgagaccaattccgatcttgagggactctactttttagatattgaatatcctgggcaagacttaaatggcctagcactggcgactcgaattcgcgaggcggatgttaatgcgcggattgtcttcgtgtcgacccattctgaaatggcctttttgacctttgaacgacgaatcgaaccactggactttattgtgaaagatttgggtcaagaaacggtcaaagccaaagtggagacagatattcgggttgcttatgaacgttataccaagcaagcagtcaccagcaaggccatgttttcttactctaagggtggtcagctcttcaatgttccattagatcaggtgttatttatcgagactggagcagttcgtaacaagctggttctccatttaacagatcgaattgttcaatacaatggtaagattagtgatgaaaccgtggcccacccagagttattccgggttcataagagtttcttggtgaacccgcaaatgctagtacgaattgataagcaacatcagcttggctactttgaaaatggcgagtcggtcgatattgcgattcgtaaaatgcatgatttaatcgcattaatcaagcgttccgaactggcagtcacgtttagctagcttcgcttaagactctaatgtaacaaaatcgttaatcaaaagtgaattttaatgacgttggtgcaggctattatgagctttgcaccttttttggctttttagattaatttgcatgtatgcttagactattaaatgccagctgtgggagctggtctggaggtggcgtcatgaagcagttctggtcactaatcttaatgattttggccggttgtttgttaatatttggttcggaatacagcttgcaaggtgattatcatcgacgaattcatcggctcactgtgtcaaaggtggtttaccatcaaaatgctacctctgcaacaatcagtggccgtaccaagcacggtgtcattgtcaccttaaagagtgggaaacatgtccgtcaggttatttcgaataagcagagtggtcaattctatgttaaaatgccagttcataagcgaattacaattaaagtcgtggggctaaaagccaaagtactaacagtaccaaccgggacaaagagttagatgggtgagcgggcaagttgccggctcttttttgatggttaatgactaggacagcgtgccatataaaagctacggtgaactactcgaatttatttagttgttagtcgcgttacggggttgctaaaaaatcattaagcttctagttttgcgctaggcgcattgttgattttagcgtacagtaacaatgacaagaaaaggagtcgtggctgtatgttagtggttggcattattttggtgattggaatcatcgggacactggttttacgatttcaatttcactttcgcctcgcgatgggcaccattaccgagacggcgtttgcctgctcattgttgaatatcggggtatttttgttgtttattttattgggtcagttaacgggaccaatcctgctatcagaatgggcctacttgccgatttatcggttgttacaaggaggtttgattcccgttattggcattggcttggcaattctgggaatggtgcgtgagaaaggcctgatgaattggtggctattacattttaatgtgctatttttgatttttgacgtgttattagtctggcaggggagttataaaagttagggtggccagtgccgtgacgaagttgtgcgtgaaggtcgtcaatgcagtaacatgatggtaattgctaggctattgatcacaaagtggagcgcaatggccgcgcgaattttacgggtcagccgataaacaatagctagcacgagtcccatggtgacgtatatgaggaagctcggtaaggttgaactactatggagactaccgaaaacaatcccgctgagcccgaccttgagccattcttgttgaaagaaaaggttagtcagaacgccacgaaaaactaactcttcaacaattggagtcaaaaaaacggcgctcaacgccataagccaaagcgacagaggactgccggccattaaatttttaatggcggcgttattttgtgtttgattctggtgatacagaagctggtttataaattgaaagccgccctcaaaaattaagatggtgagataggccattccaataatttgccagtcatggtgttgtaagttttctgattgatagttgccggtatagtgccgcattagggcggttgccgccagtgctaggatcacaaaaattaacagatagacacctgccagggtgatctgccaggctgtgagctgatgctggcgatataattggttaattaatttaagtaacattggtgggatcacgaccccaacaattaggccagcagtgagcaacacgcgtccgagccaccccaagccgcggtcaataatttccatcggacttcacctcccatggttgattttaccgcagtgttcaggtttcgacacggatttgcaaatctgagaaaggcatcgatgccaggcacaagcggatgatattaatctggttgaatgctaaaaatataataattgtagaaataatggttgatgctctataaaaataaagaataaaaaagcataattcggacaaatcttcacactttcttcacaattatgtaatagtatatacttgtacctaatagttatacacttgttcattttactcccccaaagtggatggacgagcaagtacaatcccccatattgtacttaaacctaactctttggccctactgctactaagcggtagagtcatttttttgttgcacgtccccaaagtcaccgaatacagtacctgcaaaaaatcgtcccttaatacatacttaaattatttttagcggtctaaactatcaaattcaactgggttttatcatttgatttattttttgcggaattaatgtggctgcaaacacccataattatttgattggtgctagctaacgattgttcatattagccttgaacgggctagtctcaaaacaaagtgacgctagtgtcaaaaatcaattggtttaatcgcaacaaaaaaggccgaggttagaaaaacctcgacctagttaagcagtcagttagaatgcttcaccagaatagtcgacctttttaggatcggcatttttgatgtgttcggaagcaaagttaaccgtttcgcgaatctggttataggttgcttcatctaaaccaagtaaatccatgcaagaattaacgtgggcaaaaatctctggtttagcatcgatggctttttgcgacaacgagatgttgacttggcgttcatcgtccgtatcgcgcttgcgttcgacccagccttgggtttgcatccgtttcaataacggggtcagagtcccgctatcaaggttaacgtgtgaaccaagttcccggaccgtcatcggactcttttcccagagtgccaataaagtgatgtactgcggataagtcagcttgaaaggtgctaaagcttcggaataaaaatgattatatcgtttgctggcggtgtagagcgcaaaacagagctgttcgtcgagcaaaatgttttttgttggggttgccatcaaaccgcctcctttactatctattttagtacattgtacgcaattaattcgccaaatgcaattaatattgcgcaaatacattgttttcgaacgatttatttataaaagcgggttaattaattgacctgttggcgttgttgggacttaatgcatgtcaggaataactgggccatggcctgctgattgatggcaagttgatggttgtccgtgaacgcataaagtggaacttgtgctggcaatgttttggccgcgtgatcaccaactggaatcaggcaggcgatttttgttttgtcatgtacaaattcatgagcgtcacgtggggcggccttaatcgtcagtgatgccaatacgtgataaccggtcggcatcatgtgttgtgcatgtttgacatgcaccccgtgtagtcgggaacgtaactggaacccagacgtggtggtcaactgtaacgcttgctttaattccaataaataagtttgttgattatcaatatttttcaaccggatcttgaagtgtccgaatggaatggcgcgatcctgatgttggacggctaaggcgtgttgttcgacccgcattttatccttaacgggctcaaaggtatattgttgtaaaagttgtgttgctgttttcaaactatcactccctacgattaatttagtcctttaaaaacttgtggtcaaataattggttacgtttgcgagtgacgtcgttttcaagtaaaattaaagtgatagggggttggaaaaatgtttatgacaactggtgatttacagcgctcccatatgattaagggcgtcgtctccgtcacaaaacacctgatgtttgaatctgatggtgttgatcagtttgaacggtttgacgatttaatcgagcaagtcaagccactactgctacaaaaggcagaggatcaaggtggcgacgggttaatttatgtgaacttcaatactgaagtcgctcagatgagtgttgcaccacggtttttgatcgtaaccggctatgggacggtcgtcaagctcgttgatgaatcagtctgatacttaggatctgaattttcaggtccttttttgatagcaaacaagtgatagaaaggaaggtttgatgaccagttattcatttccacatggcgccattgacgtatacgacgctacccaaaacaatttaaagcacgttagtcttcgcgttcctaaatatgcaaccacggtgttcgtgggcttgtcaggttccggtaagtcgtcactcgtttttgatacgattgcagcggcgtcacggcgcgaactgaatgaaacgtttcccagttttacgcaacaatatttaccgaagtatggtcaaccacacgtcgggcatatcgagcacttgcccgttgcgattgtgattgctcaacaacgcctcggcaagaatgcgcgttcaaccttggcaacctatactgggatttattcgttactgcggctcttgttttcacgggttggggaaccgtttatcgggtattcggacagtttttcgtttaacttaccccaaggcatgtgcccaacctgccaaggtttaggttatgttgacgatattgatgagcagcaattgattgatcctgagaaatcattaaatgagggggccatcacgtttgtgagttttgcaccggatacgtggcgttggcgccgttatgcgacgagtggtttgtttgacaatgataaacccatcaaggattatagtgctgcggaatacgatttactgatgcacgcaccgcaacagaaattagcccatcctggagaaggttttcctagaacggccctgtatgaaggtgttgttccgcggatcaagcgctcgattattggtaagaaggaagccgaacaccatcgcgatgcgattgcggcgatcgtcacgcgcaaaccgtgcccaacgtgtgatggcacacgactcaaaccggtcgtgttgaccaatcatattaacggggtcaacattgctcaggtgacggctatggatttaaagcatgttctggcatttttacaagcgattgatgcgccgttagcccaagatattgtgcgggagctgacgaccaagatccaatcgttggtcgatattggcctgggctatctgacattggatcgtgggaccagttctttatctggtggtgaagcgcaacggattaagattgccaaatacttgaccagcgccttagtagatatggtctacattttggacgagccaagcgttgggctgcacccacatgatattcagttaatcaagcaagcgttaacgaagctgaaggataagggtaacacaattctgattgttgaacacaatccagccatgtttacgttagccgactatgttgtcgagatggggcctgcagctggtcgcactggtggaaacgtgacctttaccgggacttatgacgagttactggcttctgatacgttgacgggccggtggttgcgacaatcgcataaatggggtcaagaacgaccagtccaggcccacttggcattacaccatattaatgaaaataacctgcacgatgtcagtgtcgacatgcccctcggtgtgatgacggtcgtctcgggggtggccggttcagggaagagttcgctggttaccgcgctaaaacggcaattaaagacggcttatattgatttagcccagacaccagtgggcctgaatattcgctcaacaccggcgacttacttaggagtgctcgaccaaatccgacaactattcgcgaaagccaatggcgtggcaactagttggttcagctataatggtaagggtgcttgtccgcggtgtaagggtaaaggcgtgaccatcacgaatatggcctttatggatcccgttgtgcagacatgtgaattgtgtcatgggctgcggtataatgaaacggcgctcagctatgcttaccagggtaagacgattgccgacgtgctccagatgtcagtcacagcggcgttagctttttttgccacgatggacaaagtggctcagccattgaagaatttagaccgggtcggtttgggttacctaacattggcgcaaccgctcaccactttgtcgggtggtgaactgcaacggttgaagctggcggttgagctaggcaagcagggaacggtgtacttgttagatgaaccgactgccggtctgcatttgcaagacacacaacgcttattaaaattattcgatgccttagtggccgctggtaactcgttgattattatcgaacataatctagcggtaattagccaggccgattggttgatcgatgtggggccggatgctggtcagtatggcggccgaattcagtatagcggaaccccacgagcagcagttgacgtgcccacttcacgcactggagccgctttgaaggcttggctgaaggcgtgattagaaaatttgattaaataaaaagcacgtgcaattgcacgtgcttttttagaagggcggtaggtgggaatcgaacccacgcgtgccggagccacaatccggtgcgttaaccacttcgccactaccgccatcacgttaacttttcgtcaacatatctagtatacactaaaatcgtgggttgcataggactttttgtggattttcagaaattaatcgcctcagtttctgaagcgttggtgaaggttctactgtgaccaacaattatttaaccgttagtaaaaggccatagttcccctaacaatgggagctacggcccgtttgccgtggttagtgtgtctaacggataggtgaggtggaccagcacttatcggttgagcaaaattattatgaattcatccttattgaagaaatgcgtaaaaatctttgcaaaggcactactttgttaaaattcacaaaataaaagagcccagtaaataagtgtttaccgtggctcttttattgctcatagactaattatgccccaggcagacatagacaatattgttataatagtgttttgaagacgtcagcgacaagtaaagacaaatttgaaaaaacgcgtttttttaaaattgctttttatgcaacggaatggatatttattatcaaaaatgaatactagttttcgcttctttttcagtctgtgggctattaaaaagtttgtctaaggaaccggaaattttttcgtctgagcgtgctttatactcatcaattaggtatgcatatatccgggacgtagtgccaatatcagaatggccaaggcgtttcgatataatgtataggtcaatattctgagagagtaggaacgcaacgtgagagtgccgcagactatgaaagtggaaaccttttcgtgtgatgcctaatgcttttaaatcagagcgtagaactttattaacaccgttagaggttggaatgtcacgggcaacgttctcaaataccatttcttggttatttaccttaagcgttttcaaactatctaaaaattgtttgttaacacggatggttctatttgaactttcagttttggttggcttgaacccaccaccttcaacatagttccatgatttatttatcgagatagtattgaacgtaaaattaatgtctttccaagtcagtgccatgatttctcctagtcgtgccccggtaaagatggcagttatgatcatgtattgtgacgtgtaacgaggattgaggtgattctgtacataagccgttagttgcttaatctcagctagacttaggtaatcaatcttaagactacgatttttgtcgtaagtgataattacgttataagtgaagtcagtttcaacatctttttcgaaaacagcattgctaacgcaagctttaattaggttgtgcagtttcttaactgaatctttcgcatgatttttgccatattggtttatgaatttttggtaatccttacgagtaatatctgcaatacgtgcatgagcaaagtaattttctatttcagtatgaactaattcatatctacgagttgtgatataggcgagattaggtttgcggtatgtctcataccacgaatagaagtatttagagaactcaatagatggcttcttttctagttcaccagaaaatttactaacttcgaatgagttagcaaattcctctgcgtctcgtttacgggtgaaggtttttcgtttacttaggtagttccctgcatgatctctatacgaaattcttactaggtaaccttttttcacacgtttaatttgtgccataataaattcctccttgtgatatactagaagggcaaaagggtgcaacagccctgttagtatttattcaagttaagcacatccatcttcttggcgggaggggatgtgcttttttctgcttatagatcgttattagcgaatgcatctcttaaaagaactaataccaaaaaagcaatccagattaaaggagaatggaaatgatagtagaaaacagcaaatataattccaataactcctacgatcattatcagccacgagactaggcttgaagtgtaatgtttctgatcaagtgaaggattacttttaatagctggtttatatagagtaaaatgggctattaatgaaaatataaagataactggcaatatccatagtgaatctgcaaatattgattttggatatgtttcctccaatgccagcactatgaaaaatgggtaaaagtcaatattattcacaagagcatatttccaattgaaattcatcgatctaaccatctccaataattgttaagttttatattcaaaaatttaaacgcgagcggcaggagtcggacctgcatagtactccaagaaagaatgggcttcaagacttggaacattgttctaccgttgaactacgctcgcatgttaacagaagtttcaatagatgttgtaaaaagttgtgtacataccaaacaatcccacgatgatggcaactattaatttgagggttattataaacatgttgtaggggttgttatgatttgtttgcagaagtgtatccacaactaagtaaagagatagtactatcaatccccaatctaatagttttgtgatatcaatattcataggtgcctccataattatttgctattaacgtacaatgcgagcggcaggagtcgaacctgcatagtaggtgttaagagcaggggaactctatttggagtggacacgttctaccgttgaactacgctcgcatgttgcccgctaggctggtagtgggcgatggtgctactttcgtttatgaatccagtaagctaaaatggcgactaacactataaagcaaatgatgccaattacaatgttgaagtcgaacacgtgtgtgctgtaccttcctacatacaattccatagctagtctgaatctttaccagtaacggttattttactagcaactagtgatggtacggtgttgctaccaccaattttggtatcatatgattgtctctttgaaaaaacaccttgaatgtccacataatcgtcttcgactgctggtgttttaccatcataggcaaccataaacgtgtggtctggatcatcgtctgtgtatactagaaggactgtttggccatctttttcgttagcttgaagtacttcagcctttgaaatatgatatgattttccaacccaatcatcagacttggcaaaatcgccataagtatatttttctgcgttattttcgccttcggttgcattatatgaatcactagcatctgaactactgtcactgctactagaactactgtcagaatctttatattcagtaatagtcaattgcgacttaggacttttataaccgtgatatgtggcataaacagtatactttcctgaaacaaggtaatcgtcactaaactttccttttttattggcttttacagtgtctgaaattccatcttcactagtaggtttgaaatgaacagttgctccgggagtggctgtcccctttacagtagttacattatcaactttattttgatacaaagaaacactaactgttgtgtttctaacgtttgacttgccattagaagatgtactcgttgattttattccagcaaataatagcagtgcaaaagaaagaaacactacaacgattgaatatatagacgtctttttccatttgcttagttctttgcctttagctttcttaaaaatccatccaattgttgacacgataaatagtacaattgctattaaaaatactaaaaaagacaatacccctaatgtttccacaacaaattcctccaaaaatagaatttcagcttttagcgacatccgtatctggtcttatgtaagtataataccgctaaatatgtagaacgtgtgttctttttaacgcataagtataggagcaataagctcctataatataactctgcctataatacgtacctggtcatctttaacatgacgtggttcgtattttttgttaattgatcgtaagatgacttcatcggaagtgtagtcgtagtaaatttgcttacaagtaacaccgtctccatcaatttcaacgatagcaatttcaccattctcaacttcttcttgctgatggtagaagataatttgaccatcgtgaataagtggttccatcgaatcgccttgtatacggatggctgtgtcagccccatgtggcacgtcagtgaagtcgtcgtgttcgatttctacatcaccataagtcaattcagtagggttagcggctgacttaccaacgagtggcaagttaacaactttaccattttgttctttcagttgattgtcagcgtagttgtaaacattttgctgacgatcgggcgttaacattttgttaattcttattatttttttatcactgttagttaatgggaaaacttcatctttttcaaatccaagaatgtactcaggagtagtgtgtaatgctttagcgaaaacgtccacattatttaacggaaactctctagttttattgaaatatctggacaatgctgatttggccatgtttacacgtctagccagttcactgagtgttaaattttgctcatcctttaattttactaatgtgtcaactatttcattgtttgttctcaacataatccctccttagttaatgcacacattatagcaccgttcccaaacggaaacaatcaatatagcaaataatctttatgaatttttttgagacattttgttgacaattgggaacgattgcgatattctttaatcgttcccaaacgagaacgaaaggagatggcaaaaatgtcagtagatttgagacgagttaaggctgaaagagttgctaaggggtattcgcaagaatatatggcaaagatgttgggctggaaaagtagagcaacatattccaaacgagaaactggaaaagttagcttgggagctgacgagcttgcaaagatagcaagtgtactaggattctctaacgatgaactaggaattttttttacaataaccgttcccaaaagagaacgaaactagaaaggaatgatccatatgaatgatttagtaattatgaagaataagcaagctgttactagtagcttgcaagtggcagaggtatttgaaaagaaccatcgagatgttttgaaagctatcactaatcttaaaaaagatgtgcgcaattttgcgcagatgttcagtgaaacaaatattccagatagctacggccgtaatcgccgggctttctacatgaatcgtgacggtttcactttgctagcaatgggattcacgggagataaggcacttaaattcaagcttcagtacattgaggcattcaactctatggaagaacaagttaaattgccaacttcaccgcgcgagattgcgagattggcactccaagccaatgaagaaactaatcagcgcctagatagtgtggagggcgatgtgaaagacctcaaagagaaccaagttattcctaatcctgaatatagtgcgcttaaccggcgtgttaatcagcgcgtgtcggaagtcgcacatagctatggtcatatcacacagaaacaacgaggtgagctgttcaaagatattggcagtggaatcaagaagattgctaacgtgagtgctcggtcaatgctacgcaagaaggactaccagatggtaatggacttcatcaacgattgggagccgtctacagcaactaaaacgattattcggcagacgtcacttagattcgacaaagagccagcataagaggattagcaatatgaaattagaaaggagactctattatgcaagcattaaaagtggcagcagttccgatgcacgttaaaaacatggataaatatgtattagttgatacagatgcatataacaagctactggatcagactacacatggacgtacatggataatggacgatttacgtatctggtgtggagacaaatcgattaaatggattaaagaaaatatccttgaaaatccaaaatacagccgacagattggcagaatggagcaacaaggtcaaataattcacaagggacgtggtagcgcctggaagtttaaggctagcgtgatggctgactttttggaatctcattgggaggaattgccgtggtagaagtagcggtattaacctgggcgctaacatccgtatggtacaagcgccgagagattagaaactggtttggaatttaggaggaaacgatatgtatggagaagacattgagcacgcgttaagagcacgtaagtataacgcgattcgtgcagatgaacgtgagctgattaacgctatcacgtacgatacagatagaatcattaagcggcgcccgtgctttggctattcagaagaatttattggcgaattacaagaacacgatattaatgtttgcgagccagatggaaattctgatgagaactggacgtttacattgccaccaatgtattaggaggaataatcatgaaagttcatgtaggtgatcgagtgagttacaaggcagagtatagttgtggccaattaatacgagaagccggagttggtaaagtagtggatattaaaaaaatcccgttcacattgcgcactcaaaaagatgtggctgtagttgaacaaaatggacagcaattcgagattattaccaatggtattcaagtgctcaagtaggaggaatgatcatgcaaaaagcatcaattttaccactccacgagtggaaacgagcacaaaaaaagccatcgctagtagcggctaacgatggactaatggaagagatgattagtaccaacatctactctattccaaagcagtctcgtttgcaagtgctaagaaagcgaggacggtagttatggaagaaatcgtgaacaatcacatcaagtttctaaagcatgttatcaacagtgtttggatcagtgatggtgaatcgctggtcaagttgtacaagatgttggataagagtgaaacagaattgaacgaattacgggggttaatttgatgatcaatgaattgcttaaagaagagctaaaaacggttaatgatcgtgaacaagaaggctttaaaattaattcgctacagtctgctgactgggcaatgcgtaagctacaagcaatcgagaaacatgatcaggaagtcaaagaagcagcacaagcagatattgatcaaacaattgcttggcgggatcgtaaacttactgaaaatgaatctagtcgagaatatttccacggattgctgaaggattatctatatcgtgaacgtcagcatgacagtaaattcaaaatcgatactccacatgggaaagtcacgactcgtaagacaccggcaggtctgaattatgatgaaacaacggtactaaagtcattacgagaccaaggaattaaagaacttattaaaaccaaggaaaccatcaaaaaaactgatttaaagaagtccggaacgattattaatggaaaattcgtgcttgaagatggacagattgttgatggtgtaactgagaagccagccagtgaatccgttaagtttagtttgtaggaggcaaaatgaagttttatgcggacggaaacattccggtgatacccaatatgtacttcatatatggtgatggtggtaccggtaagacaagtgtagtgaaacagtttgtaggtcacaagttgttgttcagcttcgatatgtcgagcaatgttttgattggcgataagaacgtcgatgttattatctttgaacatcgtgacatgccaaatatccaggcaatggttgaacaatatgtcatgcaaggaatttcagatgctaagtatcaggtgattgtattagacaatatcacagcacttcaaaacttggtattagaaaatattgataatgctgctaaggacaatcgtcagaattatcaaaaattacaattatggtttcgtgatttgggaaccattttaaaagaaagtggcaaaacgatttatgctactgctcatcaacttgacaacggatcatcaggaattagtggcgagggtcgttttcaagctgatatgaatgaaaaaacatttaacgcatttacttcgatgttcgacctagtaggccatatttacttggcagcgggtgaacgaatgattgatctggatccagaaaaaggaaatcacgctaaaaaccgattagatgatcgcaaattgattaaagctaatgagctaattcagtcagaaaaaggagagaaataaaaatggcactatttacagtagatacaaataatattctcggacaagcagtggaggaggccggaacatacaatgtggtggttgctcctagttctcaatacacgacaactcaacaagccgggaacccaatggcagtatttgattatgaagtgctcgatggaaaatataagggtggccgaattcgattcgacaatgaagtgtgggataccagtacagaggagaaaggtaatctttcgattaaacggtttaacacgattgcggttgccctaggcgcagctaatgggacttcatttgattcgattcagcaatttgtctcgcaagccgttggcaataaactggctgtcacggtcgattgggaaactggtcaaaacggtaaaacttatttaagcgtcaaaagtcacaaaccatttatgcaggatggtagcaaaccaaatggcgttaagcgaccagcaggcagtagcaatacaggaaatagtggctttggcaatcacaaaagcacaagtggtggttttggaacgacgactaataagcaacagggtaatggattcagcactccagcaagtagtaacgctggtaatgtgcaagccccaggatatagtaatcaatcagctaatagttaccatggcggtgggtttcccccaattccagacgaatcgcccttctaatttaaactgtttattaaataaagcttccaaacattggggtgactagatgcaacagtcacgagcgcagttaattgagcaggatggtcaatactatttggttacacggttagatgagaagcctaatttagaccatatagagaccgttagcggctcctacagccaattttatgtggattgggaaatagctgacatacgtaaagctaggccacaacagcgacgcttgttcttcgcgttgcttagtgacatctatacgtggtcaggcatgccgacagacttcttgaaaaacttgttttatttgcagtatgagtcatacacgtttggcaagcagattagcttgtcagacaccacagaatcgtctgtgagcgatgctaaccagttgctagacctagtcatcgacttcatgtttgagtggcacgtgccgttcaaggaaggctataagctattgccacgtgagcaagaatattacctgtttcaatgttgccgccatcgagtttgcatgatctgtggtaatcgtgctgatatccatcatgtagacgtcattggagccggcttgaacagaacacacgttgaccacaccaaacggcacgttatggcattgtgccgagtacatcacagcgagattgagcaaattggctccgtggcatttagtgcaaaataccacgtcccggtagatggcataaaactagataaagaaacactaaaacgaattggcttgaaaggtaaatacagcagtgactaatacaccgggtgggtggaatgcctactagtaaataagggaggattaaaagatggcacaaaggagaatgtttagcaaccgtataaccgatagcgctaaatttttaaagatgccgttgagcagtcaggcactctattttcatttggggttgcatgcggatgatgatggtgttgtagaagcgttctcggttatgcggcaaactggtgcagttgaggacgatttgcgaatactagtagctaagaattttgtaaatgttttaaacgatgatctagttgcctatatcacggattggaacgaaaataatcgaattcgagcggatagaaaagtggattcgatatataaagacttgttattagaaatcatgccaaacctagaattaattgagcccaagccgcgtgctgacacgggtaaagttactggacgtccaatggacaaccaatggacggacaatggaccgcataggttaggtaaggttaggttaggtaaggttagtaaaggtaaggtaaataaagatagtcaccatttggcaaagccaaattatgacccgtcttctcagccatacaaaattgctagtcatttgttgaccagaattaaacaacggcagcctgactttaaagaaccaaacttacaaaaatgggctaatgatattcgattggcgcacgaacgtgatcatcgtgattatgaaaaattagattggctggtagattggtcacaggacaattcattctggcaagcaaacattttatcggcagggaagctacgcaagcagtatgacacgctcatgggtcaggctgaacgggatcgcccgactaatgttgcgccacaaacacgagaggactggtttggctaatggaaaatgtaacgaagttattcaatcaagccacgattcagaaagtagtagcggctagaggcattgatacaactaagttgccaaccaaagaagaattggatcatcaaacaattgatcgggcgaatgcgggcgtaattgctaaccgaaaacggtattactatcgcatgtcagtctggtctggaggcgtgccactacgatttagctttaatgattggcaggttgataaacagcctaatcaagccaaagctagagaacttggtaatcaggcatttaagttagctaggcaattagagactaaccagttcaacgtagcgcttgcaggtggacccggcgttggtaaaacatcattagcgctagcaatcatgtatcagctaatgaatgcaggacagacagcaatgtttgtctcaacagctgagttgctacggctagttaatgaaaagtatgaagcaccggatgtacgtcaacgtttactatacattctaaaagacatgcaaaacgttgatgttttagttttagacgactttggtactgaaggcggtaagccaactgagaaagggttctacaagccagtacacaaagatttgcagacactgatgtatcaagtggcgaatgcgcgttgcgattttgatcataacgaagtcaaacatataaccatcattacgactaacaacacacgtaagcaattagaaagtatgtacgacggcaaaacaattgatcgtttatataccaaggatactagctgtcaattgctgtttgacaatatggaaggagtcagaagtgtatgagttgtgaattatgtcatggtagtaaagttgttcagcaaccacttgggaattatgggtttacgtttggaccatgcccaaattgtacgaatgagatacatgatcattacgaacaggagcttgaaaagaagttagcctatggcaagcaaaaattggcttaaagagctggaagtcattcataagctagaagcgagatatggcagcatggataacgtgcctaatagcaaactagctaacttgcataagatgcctggaattaaggccgtatcaagcgattacacggagattacgcgtacccagtataatgccattaaattagtcatggaaggcaagcaggttaaaactaggacgtctcgggagctaaagcacaataacgtttggctggatagacgtattcgcgcgatcgacgaaaacaaatactacattacggaggacgaagatgcctaaacacactaagaagcgttcaacgattaaacggaagcaccagcgcatgaagctacacgccaaagcaaacaaagctaaagcacaggataataagcaattggccaaggaatatgagccgtacaacattaataagcgggcgttcggggaggattgaaaatgagtattagaaataaaatcggaattggcatgatagccttatttattttagtcatgatcattgggaacttcttagacggattttggcatggagttgctttcatcagtgttgtggcatgggttgtgatagcgttggacttatctagttccaagagatgattggagatggcgacgatgattaaactagataaatgtgttgctaaaccaacagaatttaacgtaattaagattacaagtgaattgggtaatgaagtacagaaggcgtttaagactgctgataagcttgataaaaaactagatagaccaagaaacacttggaaagcaatctttcaatatcatgggttgatttggactaatatatggggatttgaattcatagcaaattatggtaaggagaatcagtgtagacgacagccagtttcacttaatgatcggattgtcgaagaccgtgatagtgagcaattcttaataccaaatgatctatttgagcgttattttatgtaggagatggcgacgatgattaagtttagagcgtgggataacgagtgcaaggtgattagaggctatgacgaattgaaagggttgacctttgacgccttagatgcaagtgattttaaaattgaacagtttaccggcctgaaagacgtgaacggtaaggaaatctacgagggtgacattttagaatattattatgagacacatggacaaactttttatgatcctgacacattaggcgcaattggcggtgaaccgggtatagaaacagatgttatcggaaaggttgccatctggccatcaactggagttgtgttaacgagaattaaggcagaatatccagaagattttgattcaagtaattttgacgttcccaaaatgttacatgttaacaaacgctttacgatcattggcaacgtacacgataacccggaactattggaggcggacaaatgaagttctatcacaaacagccaattgaggcagaacagtttgatggtagtcagacaagtctatttggctatgaagttatgccagactcattacttgatgcattaacaggtgagccagcttattattcaatactgattgacgatgttaatcccgaacctgatgactttccagatgataatgaagtctcgtttgaaattggtgattggattgttaatgaagcagacgagattaaagttatggctgatgaagaattcaaacaacagtatgtcgagttaccggtgataccaaaggcggttgctgattggattgaaaagtgcaaacgcgatggtacttcggttggtgacatgctttgctatgaacgtcaacctgaaaaagtgcgagactggatagaacttacacctgggacttatgactttaaccagcgaagatatgcagaacatcaagacttggttgcccgtgcgtggctagacgggtatgtggtggaggaagacaaatgaaacagatatttgaacttctttggaattcttccccgttgcaattgttaggatattgggcactcgcaactgctacgttagtaatcgttagtttggtgctactttggtgggcaaataagcatgactgacaccgaatacgccaaagcaattcaaacgaaagccacagttgccaacctggaaatgaacgcggcactgacaattgagcaacaggcacaaattaggcgggactttattgctgacattgcggagttgagcgaaaggggaattggtagtgaaacgaacgacgattagaaaagttgaagatattctacgtgactatcccaagattgacaagtatatcgagaaacgtgaacaggaattacgttatccaactgtaccacgtgatgataatgttggaggtggcaaggcacaatacaagtatccggaaacgacgctcaacacgattatcacgattgatgatgatcggcgcattaatgccttgaaacatcaacgggaagtgattgacgattgcttagatagtatcggccatgacactgaagtaatcgtaaatgaactatattttaagaaacatcagcaatacacgattgatggactaattacaaaccacttaatcaacgttagtcatactaaggcgtttaaattaagaaatgagtttattatggaatgtgctaagggattgggattatatgaaatcgcgtattaattgcgtattttcgacccttacaatcgtgctaaattggtagtatgccaaatgtgattgacgtgcatgaagtaatcctccaaattacagattggtaatcgctgtgggctaattggtaagccacaatggaatgcgggttcgagtcccgtcagcgatattaagtatcaagctggtgtatgaggaactgataattccgcccagcatgtctgcgactgaacgatcgttattagacgatagcctaataattattgaaccttgctttaatacggctgggttgcagtgaaagaaagctgtttcaatatgtagattatagtagcaagtttgagataaaaagcattgacggttgtgccgacgcaaagcccaagcaaatgttagtgtgagaactagcagaaccaaatgggattctcaataagtcggtgttgtagttgaagcggtaataccgtttataaacggccagtcaagtaccagtaggataaatctacagacatactaaaacaaaattatgtttaaaatatgcctaaatcatctgaacgttggtagccattgtgctagcccatgccttgtaatacattaacagctaattaggtagctcctaagtagtaggcgttaatgagcatgtagcttaaagttatcgtagctaaagctaactacgcaagccaatgcggatacttgtttggctctgcgacagagacagtgagctgtggcggtctgtaaaaccgttgtcgagagactgagtaggtgcaaatcctaccggagccatttacgacctaagtaagtcgctaaactgctgaaagcttgagatgtggatgaagtcatgttggcaattaccttcataacatgaactcccgtcgtcttgtttacattggctgtgcttgtggcggaacgggtagacgttttgagaggcaacacaggatggtgttgttatgtagggtgcaaatccctaccaagcacattaaacgcgtccgcggcaccaaaacggacaatctccaaactagctctcgcttattggcgggagttttttgatacatacgattaggaggtatcaaaatgcaaacaacattaaaaatcgtgttatgtggcacgctggaagacgttagaaagcgtatggcacttgactatgaaagaatatctaaaatataccctcaagccaatttggctaggcgtggacataccattgaaattaatagtacttggattaacaagtacatctcggttagacagcttaaaaatattgatgggctaaagccgagatatatggaagctgatgtatctgcattcttagtagcaacatcaaagcaaatgaaacttgcaactgaatggtatcaaagtgtgtcggtgattaactatggcaaagatgattaacacaaaatatggctacgtcacgccacaagaagcggagatggatgcccacttagataaatggatgaagcgtcgtgctaaacagcatggcgcttttagtttggaaaagaaacggagaaagcaatatgccaaggacaagaagatgccgctatcctaactgccatgcgatggtcacgttccctgaccactattgtcagcagcactatgagcatgaagctgagtacttggctagtcggcaacgttgggcacgtagcaatgacaaacaatacacacacaagtacaacacggttacacgttatcgtaatgaggataagcgtcagcaatacaatttctatcggacaaggcaatggtcaaatctaaggcaacaagtcctagagcgtgaccattacttgtgtgtttactgtaaagtgcaaggcgtcatcacgcctgctaagacagttgatcatattgtgccaattgagtttgacgaaacgctgaaagctaacgttgataacttagctgtaatctgtgggagttgccatcgtgctaagacggactgggaacaatcatactatggcactggtcaaggtaacaagttgcaaagcgtaacgccaatcaatgatgtatcgtcaatcgttgtgttaattagaagttgatttattggcacttgtcgtgcgatttaagcgactttaaatttatgaatgtaattagtcacgattataattaaaacaaccccccgcccccctaacaaatccgagaagagcacacacattgccgttattttgtgatagaaacaattttttaatttttttaggtaggggggtcacccaataatgaaaggaggtagataaaatgaaaaaagcggataaagacgtcaacgatggtcaattaacacgtacacctccagcttacttaggccggcaagctaaggtcgtttggcgtcgattagtgccttttttagaagaaaataccccagttaagcgcattgatagcggacttgtagagcaatatgcctcacaatatgagatttatcgcaatgcgtataaacatattcaggaaaacggtgaagtccaagcaatctataaaacgttacaagatcagaccggtaaaaaaattggtcgagacttcgtaggctacaagcgaaacccgatgacacaaatttacgattcagcggttaaaaatctgactaaactaggcgctgaactaggcttgtcaccaaagtcgcgcagtgatttattaaagctgaacttagatgatcgcaaagacgagcgaagtatcaacgatcgtatgaaagaatttctaggagactgataatgaagattgatttaacacaaacacatgatgttattggggcttatcaatcattagactgctcagcaattcgccaacaatacactgatccgggcacaaagtatgcctttgaagtcctcgatgagaaggtgattactggctatctgattaagctagcggcttttcgccatattcgagacttgcaacggcaaggtagcgttgaatttccctttacttattcggttaagaaagtagaccaagtgcttaaattttctgctatctgtccgaacgttgatactggcgaaccaactaagcttatgccgtggcaaaaatttattatggctatgctggttggctggcgtaatgatgacggtggcaagcgtttctcacgggccattgtttctgttgcacgtggacaaggcaagacatacttgatggcaattatcactgcctatagttatttaattgagtcattgggactatctaaccaagattacttagtatcttctattaattacaagcaaacgagtaagattctgggctacattaagtcaatgcttgccaagattgcaacgattgaaccatttaaaacactaattaaagatagtggattagatacacgaacgctgtcgtcacaggccgatcaagtcacaatgagcaagactaataataagctacgggcaatcagccatgaagccggtcagtacgactcgtttcactttacaactgctatttttgatgaaattggcgaaattaagacacgacaaaagatttctaaaattgtatcagggcaagttaaggtgcgtaataagcaatttattcaaatttcaacggcatatcctgatcccactgttccatttcacgatgatgaacgtatgattcagcaagccatggaacaagattatttacgcgatgctgatacatatttgggacttatttggtcgcaggacaatctggacgaaacttataagcctgatatgtgggttaaaagtaatcccttgctatatttaccgagccaacgagaagtgttgctgaacggcttgacagataagcgcgattctgacgctttgtcgggcacactcaacgatttccaaaacaaaaaccttaacttgtggctagaacaatcgactgacagctttttgaaactgcctgacgttgaaaaatccattgtgccctcatttagttttgatgatcggcaagtctacattggctttgactactcaatgtttagtgataacacggcattggcgtttgtatttccttaccgtgataataatgacaagccacgatggtttatttatcagcatagctttattccctggcagaaagctggttcgattgaagccaaagaaaaacaagacggtattaattaccgggacttagctcaaaagggattttgtacaattagtagccatccgcaaggactaatcaacgatgagcaggtttatcagtggttgcttaacttcgttgatcgtcaccggttagaggtgatcttttttggttatgatgcttggggagccacaccagctatcaaacagctagaacttaattctggttggccattgcaaaccgttcgacagcggactagtgaattgaaagatccaactaagtttttgcagaagatgtttgtcgaaggatcagttgaccgacttgatgatcgaattatggaaaaggcgctactgaacgcagaaatatatgaagacaaagttggtattcaagtcgataaagctaaggccacattgaagattgatgtggtagatgcgttaattgatgccttatttcaggctatgtatcactttgaagatttcggaattgttaatgacaaatcacaacaagtgtctagaatgactgtagaacaaattgaagcatggttaactaatccagaatctggaatgacagatggaggtgattaaaatcaagaaaatattaatggcaattaatcactataatgatgcaatttgctacgtactagccggaactttcggaacgattagcgcatttttgtttggattaataccgggaatgatctttctatcaggtatgtggcttgctttgggattattgattgatcttccggctactaagggtggtggcaaataatggcgattttgaaagataaattccaggcactgtcaagtaaacgaaaaactgtttcgctaaatgacgctaacttcatgagcatttttaataatggaacaggtgcccaatacgtaagtgctgatgtagccttgcaaaattcagatatttattctgtggtgacgcaactatcgggcgacttagcaacagtcaaatataaagctagtaagccacgagcacaaaatattctagactatccgagttcaaccgccaatcctcatgggttttggcagtctatgtttatgcaagcactgctaaacggtgagtcttttgcttatcgttggcgtaatgctaatggtgttgacgttagatgggaatatttaaggccatcccaggttagtgtttttctgctggaagatggatctggtctcacttatagtatcaattttgacgaacccgaattgggagtgctaaacaatgtgccacaaaacgatatgattcatttgcgattatatagtaagaatggtggtaagactggcatgagtcccttatctgccttgtcaaatgaaataaatattaagaatctatcaaataatttaaccaaaaatgcactctcacagtcggttacatctcccggagttctgaagttaaacaatgacaaaggattagtcaactggaaaataaaagcagcgcattcacgtgagtttatggatcaaatgaaggcttcaaataatggcccaatcgtaattgatggattagaagattggacaccacttgaaattaactctaacgtagctagcttactggcgtcggttaattggacttccacacaagttgctaaggtttatcaagtcccagatagctatttaaacggtactggtgaccaacaatctagccttgaccagatcaaaggaaattacgctaacgcgcttaacagatacgcacaggcaattgttagtgagctagacaataagctatcagcttccttaacagctgatattcgaccagcaattgatccattaggtgacgactttgctaccatactagctggtttgactaagaatggagcgattgccaataatcaagcaacctgggtattgcaacaattaggatattttccagataacatgcccgaggccgaagttcaaccaacccagcaagtattaattcaatcaaattcagataaaggaggtgatgatgatgacaacagtaccgattaaaggcgtggtatcaagcgatgataatgccgaaatatatcaattttggggctattcaacagttacgccaagtgatatttctgatgcccttaaaaatgctggtgggcaaccgattaaagcagaaatcaactctcctggtggggatgtatatgctggatcagatatttatacggcgcttaaaaactattctggcagcattgaaattgacattgttggtctagccgcttcagcagcctcagttattgcaatggcaggtgacactattaaaatttcgcctactggtcagatgatgattcatcgatcttcaacagtatctcaaggaaattcagataatttagccagtgatttgcaaggactagactcgactgaccaagcaattgccaatgtatatgccgaaaagacgggcatggatgtacaacatatttatcaaatgatgtctgatgaaacttggatcaatgcgcaggatgcagttaaggatggttttgcagatgaaatcatgtttgccggtcagccgaaagccgtcgtaaatggtgtgggccaattcttgagcgcggaagtcattcaaaagactcggagcttattaaagctgaaaaacgattcaaaccaaatccaaattgagaccagtcagccaaaaactacccattcggtagccgataagctggctattttatttgacaaaaattaagaaagaactggtgaaaacaatggatttaaataaattacatgatgcttggcttgaagctgggcaaaaagtagctgatctgcaagataagcgtcaaacaatggctgttaacctagtggctgatcaagataagtacacagacgaagaagtaaaagctgtgagtgacagcctggacaaagccaaagctgctcgcaatttagctaagtcagcttatgatgatgcagttgaagaccaaaaaattcagaagactaagactaatgcagttccgacgggggtagctatttctcataagaaaaacggtaaggaagaatttgttgaccaagtaaaggatatgttgcgtaatcctaataaatacaacatggtcagctctgatggtactactgatactacatcgggagcaggattgactatccctgatgatcaacaaaccgcaattaagcaattggttcgtcaatatgcgtcattagaatcattagtcaatgtcgaatctgtaagtactctcacggggacacgtaacatcgaaaagttctcaactattaccccagcaactaagattaccgaccaaaatacagatgcaactgaaggggactatccagcacttacgacaatcagctacaaaattgctgattatttagatgtgttttatgcagctaatgacctactcaacgattctgctgaaaacatcttagaatggttgaacacgcatatcgcgcgtaaagatgtagtaactcgtaacaatgctattttgtcactgctgccaagtgcaactaaaaaagctacgattgctaagtttgatgacatttttgatacgatgtacagtcttgactcagctttgattggcagttcaaccattttaactaacaagtctgggtttctggcattacgtaaggttaagaatgctatgggcgattatctggttaagccagatgttacacagtcggcatttactttccaacttgacggtcacccaatcaactgggttgaagatacctggttacctgatgtatctgctggtacacatccattctattttggcaatttcaaagaattggtcacgatcttcgatcgtcagcaaatgcaattactaacctcaacacaaacagatcgggcatttaatcgcaatcaaacggccattcggtcaattgatcgttttgacgcacaattggttgatgatgaggcggctgtaatcggttcattcaaagctattactgatcaaacagctaactttgcggcgagtgctgctacaacgactgacgggaagtaattagccaactatgtcgccaataaatacacagtgcagtgacaacctgggcggctaagtaaggatgtgatttaagtggcagctgatttagaaacattgaaatcatctttacgaattgatggtgatgatgacgacgatctgctaaagggctatttgtctgcagccactagctacattaaacaagccattggggatgacaatagcgttctaggattctatgaaatggaaggcgtgaaggacttgtttgaaacggctgtttatgccttagctggttcatattggacttatcgaacatcgattacagccatcgctgttaatccagttgatctggtcgtggactcaatcattggtcaactcagaggggtgtacagtcaaaagcaatatgaggtggggacaaatgacgaaagcaattaatcctgcacgaatgaattttagattggagtttggaactcaggcagctaatggaaaagttaaccctaatacgggtaatcctattactgattttgtccctcaattcagtttgtacgccggcgaatggtcattgtcgtttcagcaaaggttagcgttaaatggcgacacctcacaacagaatgctgtttactttgtgcgccataatctaaaaatagctaccggcatgcaattgcgacgcaatcatcaggatatttaccagattgatgacgtggcctacgatgatggtttaccaccggatggctttgacctcataacttgtcataaggtggtgatcgggcgtggcgaatgagattaaacatgcagactcatttgaacatattttaaatactatggcggaaggctttggacgtgaagagaagcttaaagctaatgcagctggagcagatcagttcattaaaattatgaagcctaagattcctgtgggaaagctacgcaaggcgcatggccatgctgaaaaagaacatctacgtgattcattaattgctgtagatcatcctaatggctcggttaacgttggctttacagccaaaggtgaaaaagggtacattgcacgttttcaaaatgatggctgggacgttgttgaccgtaatggttccaaacacagccatgtttccgggaaacacttttgggagactactcagcgtgaagcaaaaggtcaagttggcaaggcagttgttgaacaattaaagactgctatggacaagaaggtgggcaagtgacgccggtagcttttattaaaagcataattgttgcaaatattaatgaaataccagaactagctgtggaacatatccatagcttttttattccaattaacgatacttcaagtgacgagcctattgtagtaataagcgggttacctgaacgtagtcaagattatggcaatgggattccattccaatcaacgaagcaagtccagatacagctctattatcctaaagattacttgggcgatatggatgccatcgaatccgggttaaaacaagtgctattgaccaatgatattcgttgttatagcgatgctggccagacattaacaccagattcaggaagtatcacgaacactttgaaatttaattatataaaggaggccatttaaatggcaacattaggtttaaacatgttatacaccggtattaaagccgatgacgggtcaacggttattgatgcagataaggggttgtcggccgctggggtataccccattgatactagcaaagcaaacggtaacttgggtactaagactgctaacattaccgggctatctgggacggtatctaagattactggcaacaatgaagttgtggatgtttctaatccaccttcggcaccatcagtcgcgattgattcgaacgaaatcaactttattgttaaacaaaagctattgggacgggtatcagatggcaagggcggttactctgatactgacaagccggttgaagctggtctgattattgaatctcgttctcctatctttcgaaccgcgatttattattgctttggtcgtggaatctttaatgaagctggtcagaacattcaaacaaacactgatacggctgaaactcgcgacgatgataacttgacatttaccgccttgaactatgatggcttcggtggccaaccgtacaaggtatatgctgagtcagatcctaaatttgataagcaagcgatgtttgacgctgtattccctggacaaacgttttataaaaacgcgagtaacggcaccagtggtcaataaagctacaactgacacaggctcacagactggcaaaactgatagtgactcatctgcgccaaccagtaataaatgataattatggtcgcctaaaataaatccacaataccgctaggggcggcttttaaacatgctgagaagcgcattctaagcacgggttcacaataaatgataataaacaatacacaaaggggcatataaataatggcaaaatcagttaaatttgatggcaagaaaattgggacgggcacgcagtatacgttgattgatagtggtcaaaatgttgaaaaaatggccgaagcatataagaagttcatcaagactactgaagaaactgaagacagcattacaggtgtagtcgaattaacacctaagcttgcaaaggttgtggctgaaacgacctgtgatttattggaactaaatgcttcgcaaaagaaacgtgtcatgtccatggaattttcggttagcgacgaatacgacttatttaatgactgtttaaaacaattcttgggagtagaattaacatctgtaggcaacagcagcgatcaggaagaggaagaagacccaaaattgccaaagccagaatgatttggcaacttgataattttattcaggatatcgattacatcgctaatcaattgatttcacaaggcatattgcctagtgacttttatcaaagctcatttagtgaaatgcaaacagcattgaatgccaagtcacgtaaagaccgtgttcaagatccgctcgaattagcacgtcaaatcggtgcgttgtaaaggaggcaaagtatggcaacagagaaaattcaaggctacgaattcgcaattaacatggacgatggtggcatgactcgcacgttgcgagaaataaagaatgaagcaaaattactaaaatctggtatgcaagctaactttgctgaaatccgttcgggtgaaggtattatggcggcttatgcgggtaaagtcaaagatgctggccgagctattgaagcacaacgattagtaattgagcgtctcaaaaacgagcaaaacggattagaccaaaccactcaaaaaggccgagaagcttatgttaaatatgaaaatcagattaacgctgccaagcgctcaatcgccagtttagaggggcaacaagaacgagcacagaagtcacttgatctgcaaaaaagtggtgtcttacaattaaaagatgcaaccgaaatatcagccaaagtaacagactcatatgtagccaaactaaaagccgaaggccacgagtttgaagccaacaaagttaaggctagcgggttacatcagtcttataatgagcttaacaagcaactagaggctgagcaaagcagactgaataagattgcgagtgctagtggtaacagttctaaagagttcaaagaacaacagattagggttaacgaattaggcactaaaattgcccaaactcgggttaagatgaaagagcttgatgagcaattaagcaaaaaaccacagtcaggattaacgtcagtcattagccagctaaatagagtaaacgagcacgcagataaggccaatcatttatttggcaaaattctgggtgctcatttagttgccaatggtattacgagcgcttttcaatcaattacttcacatattcacgaagctattagtgctggtatggaatatgaaaaagagcagcagaagatggtggccacctggttgactttagctggtacggttggtaaatctaatgcaatggttaaaacaatcaacgacttatctgttaaaaccggtcaagccgtagatgttgttaatgaactagagcaaggcttttatcacttacattccaataaaaaagaatcagatgaactaaccaaatccatgctaaacatgtcggatgcggttggattagataaacaacagatacaagcagttacacaagacatggttaacggtctgtcacggggaaaagccaatgctggtatgttaaaccaaattagccagtatttcccgatgttccgtgaacaattggccaagtatgaatctggattaaaaaagacgggtgatacggctgcttcaacaggtaaaggcgctgctaaagccgtaagtgcctataacaaaaaaatgaccttgatgtttgaaggaatgcattatggaacaaataatagtttatctgacctagaaacatatcgtcaaaaaggtattgtcagtgcccagcaatttacagtttttagcaagcaaattgcaagtgggcacaaagtgactaatgcagaaattaagcaagctattaaggttaactcgcaatatgctgctcaacaagagacaaacgcccaaaagactcacacaagtagtaaggtaacagttgctgatttgagcgagatggctaaagaagggaaaatatctgctaaagatattgaaaatacgtttaatcaactcggatccggaaaatacgataaagccgccgacaacatgttacatacgatggttggtatggaacgtacaatcaaagcgcgtgttccagctttaattggtgacattgaaaagccgattttaaccgctcaaaatccaatctatggcgcagtttcaaaatgggtatctgacaaacggactgacaaggagtttagtaaggtcggtgtggcggcagaaaagggcattagcacgattactaaagcctttgctaaagcttttgatgtcaagtcagcaccaaaagcaatgaatgatgcaatggataacttggccaagggtgtcaccaaagcttctaactctattgccaaaaatgctccggaaattgttaatttcttcaaaactgtcaaaaacttgggtggtctgggctttgaaacgttaattgaatcacttaaaataaccaattcaattttaaagccattactcagtatggttggtgggcacacagaaaccattgcaaaatttggcgcagcatggtggttaacaagtaaagccgtcaaagagactagttcagttctgtcaacttttaaaaaaatcagtgatactgttagctgggctgaaaaagttctaggtattaaacaagaaactaaagctttagaagaacaaaacgcggttcttaaaactaatactgaactaagtatggccagtgaagaaaatattggaactggttatcggagagttaaaggtagaaaggctgggaatataggcgctgatttaagctctatatcagttgaagcggaaaacactgaaaaaattgctaaaagcagtaaatggtcattgctaggaggaacaattggtacaaggattatcaatggtgctggattagccatgactgcttgggacgctggtagtagcattgcgaaagcagttagctccggtaaggcgtctgataaatataaagcaactggtaaaacagctggaacacttatcgggggcggcattggtgcagcccttggaagtgttatcccgggagcaggaacagctgcgggagcaatgttaggagcaagcattggtgatggtgttggtggtactaaaactgcaaatacgattgttaaaagaattagtgatgcgctaaaagggaagagcattgaagctcccaagattaagacagagtccactaagcgctcactgagtgatctaggtaaggcgtacagttcctattattctaaaaagcagaagcaagatttaaatgatgtgaacgtacttcataaagcgggtatgctaaccgatgcggagtataaaaagcaattagcttcaattaaaaagaatgatagtgagacaaatcgttttgaaaaaatgtcagcttctgatcgcaacgctattgcgaagtattatgcgcagcaaaaagcaagtattattagtaaatggaatgctagagagagaaaaactagttctagctgggatgctaaaatagcatctgacgaacgacggtttggtgccaactcgattattgttcagaaagacatgtctaaaaagaaaacagctattaaggctgaagaaaacaaaaagtcagccgctcttgataaactccggattaaaagtgcaacggaaactactgcacaagaagcctgtttacacacaactttaacgggaaagataaagtcagctgctaataagcagaatgatattttgagaaatcttgccaagagcaaggggaaaatcactcgtgaacaagcaaatgatgctatttcacagtcgaataaagagtacaaaaagacagtctcactggcaaaccaagaatacaaagatcgtgtttctgcggctgaaaagcaacacaataaggttataaaagcagctgaaagacaagctagcgaggcaatcagtcaagcaaagaaccagtacagtaaaacagttgatgctgctaaaaatcaatattctggtaattctaagtatgccgagaagcaacgtgcagctattattagtaaagctaaggatcaaaaacaaaagtcaattgacaacgctttagagcaggagaacaaaactgaacaacatgcggatcgtcagtacaagcacactactgatgacgcagataagcaaagatcacaagttgttaaacatgctaaggatcaaaacagttcggtagtcgatcaggccaagtcacagtcaaaaggtgttttggggcatgctgttaagcaagccaacggctccatgaaagctgccgataagcaaggctccggtattcatagtatttggaaaaacattactagtttctttagtaatctagttaaaggatttggtattaaaccaatcaatgttggtgcttatccatcaggttatactccagtaacgatgggagcttatgcttccggcggtattgttggcactgctagagctttagttggtgaaggcggtgtcgaggctaaaattgatagagacaatgggaaagtgtcatttctgggtatgaatggtgctgaagtggttaatgttaaacctggtgatcagattcttaatgctggtgatactgctaagctttttaacggtggcctaggacatacgcttcctggctatgctaaaggcactattgatatcgcgtcgtttttaaagaaaattaagagcggtgctacttctatcttcgacagcgttagtgataaagcaatggacgcattgtctaagataactcacccattgaaaactttaaagtcaatggctttaaagacatttgatccaaccaaaactccaggagtcggttcaatcggtcatgatttaggcaaaggactagttgaccgagctttaaagggatttgcgaaagctatttctgatttagctgacaacttcggtggaggagttggcaatattaaactgtccggtagtgttgcttcccgtgcacgagaattggctagagcatttaaacatggctatcctgcttcaaataatggtggtattgccggtgttctaggaaattgggttatcgaatcaaacttgacccctactgccattgatccacttgatcatggtactgggttggggcaatggacgttcactcgtgaaacagcattaagaagctggcttagaaaacatggatatgcatgggactcagctgctggtcaaattaattacgctcttaacgagcccggtgagagtagtttgttaaaatctgttctacgtatgaccaatccaacagaagccgcatataaattctttgcaacgtgggaatcaggcggtgctatgaacggcaccggtgggcttcgtgaaagtcaggcgtcagctgtttatcgctatattaaaggatttgagaatggtggtttcggaaacaaagcgggcgtttacaaattgtttgaaggcaacttgccagaagccatagttccgatggacttatctaagcgttcacgggcttaccaaattatgcaacagataatggctaagttcggagctcaagatggcgctaatgtgataaataccggtaacgaccagattgattccgacgaagcattcaaacagcgggttatagcttcactagatgctttggtcactggccaaggagatgttaaagcagttgttgccaactctgacgtggttaatgctgtcaggtcaaataccaagaagacgtcacaatatagtcaaatgatggggtattagtattaatatattgaagagccttagaaggctcttttttacatagttaaaattaaacaaggatggcgatataattgtctgttttgaacaaaaatgattttgaatatgctggcttaaatagccgcgatgatttgcaagccgttatgggagcagtaatactgccaagtgcaccagccatagccgaacaagcaaccgatatccccgccatgtatggtaatcaatttaatggtatggactatactagtcggacaatcagtattccaataactattatcgctcgtggcagtcaggacaaatacaatcagattatgcataatttgagcggcttattgctaagtgatgatccaagtgataatggtaaagagtacccactagtatttggctttgaacccaaagtgacttactgggggcatattactgcgattagcgatccacagttcattaaccagggggcgtgggacgctacactaacgattacctttgtgcaatcagacccacgggcaaccctgccacaggttgaaacacccttaaagaacggtttaaatacaatcactgttgatggcaccgctagaacggagccagttattcaggtcgtacctaagcgggatttaaagcacattggctttaccttaaacggtggtgaatatggactgggacctgatagcgatgaagaccaagcggtggcagtacagccttatacgcaggtcgtgaacagtgatgtattaaataccatggctgagtggactaatgatgccaatgcgattgctcagatgaagactgctggtgactacatttatcaaggtgaagctgatagcaaccgagatacccaagtgttaatggtcaagctagccaatggggttaaacaatatggtagccatcaaccagactggtatggccccggtgttcgctttaccggtatgactaacagcctaactaactatcgaattaagactagaatccaccacattaagcactcaggtacccataatgggcgcgcaatggggcgggtagaagtcctgcttttagaccctaacggagctacaatcggccggttcgggctagctgacagtgctggaggcggtaccccaacgtgttacttacaaattactaaaccgggtggcacttttgccggtggtgatggtaaacatgaaactttctataatggtaaagggccttcaggcagttctagcaatggccgtgaccagaaaatcaagattaagactggcactacgactaagacggtagtcaaacggtcacgcaacaaacgtggcaaagtgacgactaggaccattaagcaaaaggttaacaaatatcttaccgtggttaacaaagaagaaaagtcggcgctaagcactagttggctagaactcgacttaatcaaaaatggcaaggtgtttagctggtcaatcacgcaatactacaccagtggtagtcacaatggtcaaccatgtaaggaccctaaacggttcctgattgtacatggcacgtttgttgataggaactctaagtatcagtcagctttaggtggcatcggtggggtgttctttaagcactcgattgccgaagatgatgaaaatgtcggctatgaaaacccttatctatcaatcactcacctagacatttaccaagttaatgacgtatcacaggacgcacctaagtacattgctaatgccggtcaagagattgtgctgaattgtgagacagatagcaccacggttggcggtaagctagcatcaccaatctggtcaacggattatcctaagcttagccctggggttaatagcctaacgatgattggtgacttagatgacgcgcaaatcacgcttaaatatctacccagattactatagcaacactttaaaggcttcccattaagggtggcctttttacataactaaaacaaggaggttaacagatggctttaaataaccagtatttaatactagaccctaatctaaagcggattggtaccctgaccgttgatggagccactaagttttctaatgatagcgtcaagattcaactagctgatgccgatacgaccagtacaagttatgacgatgatgtcaatattggaactcaagataattttaacggcacgattaatctaaacgcccaatctaagaagttcgaccatcaaggttcattagacgtgcttcaaggccagccggattcagataaagtggtggctggtaacaacttagcctattatgacgagctatcaggtcattggtatgtcatgcgcatatacagcgtggaagagaacaataccgctgctgttaaacacgtcacaacggctaactttaccaatttatgcttgtacacactggctcatcattatcctgttgctactactgccagtgcaagcacaattcaaactgcctttaatcagtgttttaacgccactggttggacgctagactatcaaacaactaatgtaatgaccccgacaattaccattgatggtaaaacgaaagctagcacgttactacagacactcattcaaacctatgatgtcgagattgatccttatgttgagattgatagtcaagggaatatcacgaaaaaggtgtgtgtcattactgaccaattgaacaatgatgtggtctataacgaggcagtattcgggaagaatatgactagtattaaacggacaacggtatcaacacctgtgactaagctgattccttatggggccaacggtagcacaattgcagtggtcaatgatggtaagccctatatcgttgatgatgaggctaatcagaaatataaccctgattggcaagctggcctgtactatgaagccattgttactgctaatcagattagtaactcagccggtttaaagtcatgggctaaagacatgcttaagctgtataaccaccctagaacgtattatgaggtgaatgtaacacccaactttaatccaccattaggcgccactatcaggtttaaagatgagttaattgagcccgtattagatgccagtggccgggttattcaacggacaatcagttttgctaacccatatggcaacacggttggctttggcgagtatacaactgttcaagtagccaccccagcatggatggaacaataccagaatgcactcagtaaggcggttgatgaagctaagaaggacgctagttcaattaaaccggttgctttaacgcctgacggtaacaacttcacggatactacgcagactaaacgcttaatcttacaggcttgggaaggtagcactaatatctcatcatacattgacagcaagggctttatctggcgccgttataacactgatggcacggtcgatagtagctataagcaaacaggctacttaattaatgcggctagtaacgctgtgggtaccttacacggcacgattgaatccgactatatccaagatgacccagaaattaagctagataccactggtattagttatttaggcgtctatggcccagacgataatggtgcccactcagctactcaatacatggcacgtttaagcaatgggcaatacctaactagtcgggctcgtgatgacagtgggtctagtgataccatgttcgctttacaggatagcaagtttgctgtgcagtcggtgatgttacaaattcacggtcaacatggtgggacgttcggcgtgcaggaagttaataacacgatctatatttggtcgattgtcagcttaaagaacgatggcaattacattctcgtacggttcccatatgtagccggggtaacgttacagcctaccgatagtcgagtgcaacaaataatggcgcttaaaggttacggccgaattaactatgaccgtcaacatgacctagtttcaattggctattccgatggcagtaccgatattatcaaagctagtgacctgttagctggcaattacaacgtgctatacaactttaacatcacggattatggcattaattttaataagaacacttaccagtctgaatgcctagacttcccttacttttactttgcggccggtggtggtgaagctgaaacaaccgatgatccccataaagtgtgggcgttaaatgtcgtgcataaaggggctgagtttgaagcttactttgacaatgatatggtaatgcccaacctgaccgatgaaagccgagaagtagaaacttgcaacgtcttttaccaaggcacacaggcctacttgttagtgaccttcaatacccgggtactagagattgacccctattcagctgaaaaggaaaaggtgtacacaatacccattacgaaacgatcggcagctagcacgattgataaagggacaatcaatgaaaatgatagcacggccgattagaagggaggtgaattagatggctgaatctaatgcaactcaagtcattctaaccgatgatggcattaagattatcaatgctcaaaatacggctgataatgccgctagtcaggcagaaaatgctgatagtgccgctttaatcgcacagtctacagcgaatgccgctaaatcagacgcagatagcaattacaactacgccaattcagaaatagcagtccagtctaatgctacttctaaagctcaaagtacggctgataatgcgtttagccaagcaactacagcaatagataatgataaagtaactagtcaagcagtgacagacctcaaagacggttccaagctaacgattgctgacctagaaaacggactagctactaaggttgctaactcagattatgctagttacaaggttcaaacagctagtcagatagcgcagaaagttgacaatggtgctttctcagcttaccaaacaactaccgcagacttaatagcacaaaaggtagctactagtgacttctcagcctatcaagcaacaactgctaaggaaatatctagcaaggtagaatctagtgactttcaaacatatcaaacgcagactgctgatatgattgctagcaaggtttcaaccgttgactttaataatctaacaataagcaaccgtaacctagcacttggaacagctacgccaataacgtttcctggtaagaacatagataatcaagcgcaagttggttaccagttttcgagtgtaataccacttggaactgtagtaacagtaacatttgacgtatcatcttctactggtgttggtgagttcgtaatgcagttctacggaagtgatagtggaagtaactggcaaactattgctaaagataacctagtcaatggaacaaagcatgtatctgttactcttacaactactggtactcatttacatgtttacccaagaattaactttgctaccgggaacatagcatttagcaactttattatttctgagtcttcaaaagaggtaaattggactcctgcaccagaagaccaagctagtcaaacacaaataacacagttaagtgatgatattaaccttagagttactaagggcgatttaattgatgaaattaaccttcaagctggtaataccctaatatcgtctagtggtcaattaacactaactgctgacactgttttttttgatactaagaagccagttataattcctaacgcgaatattactgatacattaaacggtaaaacgttccatgggggcgacatcattagcaatgccaataacaccgctaaatattatccaatgactattacgccagacggggcgtataagtcaacgtactttgacagtgcggttggactgcaatcaagcgttgaatctggggcgattagctataaatatcgctcaatgatcggcagtgggcagtacttagcttatgattcagtaattaacggtcaaggtttcgagtcgcaatcaggttatacgtcagctaaagatacaactttttccaatccggagacaatcacgggctatgttaacgtaacaccagcctcaggaatctatctatatgggccaacacaaaaaataaactttgctggtaatgccgataatattggcagtaacgggattactatggatgcttatggcaatatatatgcacaagcgaattcttcttattggcgaattagagatattaatagcaatgatattgctgacttcggtatcgacactgccggtgctaacaatattttcttgcatcgcgaacttgatattggtaacttccaaattaacactggtcatacgtttactagtgctgataatcaagctattcactttgcaatggggaaaggtggtgccgctgacatctatgcgggtgccgttcactatactagcttagttaaatcgtctctattgagtgttaagcaggatgttcaaaaggctgataccgcctattgggcacagctaattaactcaattgacttagccacttatcagtacaaaaccgacgataatgccagccatttgcggctgtctagcattgttgacgacgttaatgtaacaaaacagtggcaattgccagacgtatttattagtcgtgatgaaaacggcaggttaaatggggtggatgacagtgtgcttttaaatgccaccctagctacggtacaggaacaacaaaagcagattgatcaattaaacgggcacaatatggaactagaggctagattaaataaattggaggaaaaattaaatggatagcattttaatcacgaattataaaccagattacacgaacaatattatgacaatcagcattcaaattaacacgctgggtattagctcacaggtcagtattaccatggatgactttaacactgccattgctggaggtgctgggggagcagatagggttaaattgaaggtgttgaacacactgattgacagtctgaccgctttaaagccagtcaccacgactacgacaaccaccacgcaggaggcttaaattatgaatatcgatgcacaagctttaattaacaagctaacgagtaactatgcccaagcaattgcccttaaagaccagcaattagcgatggcacaagttcaaattgaccagctcaatgccaagttggccgagaaggaggcagataaagatggcgaaaacgcttagttttaccgatacttcaccacaaacggttaaaattggcgataccaccactagctttacgttaatttgtggcaatgataacgtggccactgacttaactaatgttacttcaattaccgttaaattaggcaatactagtggctatcttaaatcggccacagttgacccaactagtttaacggacccaacgactggtcaagttaccgttaactttaatgctgacttgatgaccgggttaccagctggtagctatgctattgaagtatgggtggtgactagtgctgatggcactgccatctatccgagtgaaggtactactgggttcacgatcagtcaaaatattgaaggtagtaatggatctacaattactacaattacgcttgatgatttcgtagataaatttaatgaaattacatctaccatcaagaaaggtgacaaaggggatacaggtcctgttagccctgctggtaaggatggtgcaatgagtgacaatgatatacaaacggttgttaatcaaaatttacaatatacatcaattccaaatggtacagatgtattcaccattataaacaacactgggcacacgcaacatttatgtgttaactcaaatgcagcggccctgtctttgttgaattgtcccgtaacaactgtctttatgcttgatattaaaacagcttcgccagcaaatcgaccaacgggttctgctggaaaccctacttgggtctacaatacacttgaattgcatccatatcagtctagtgaaatttatagcactgctatcgaaacagatggtaatggtgctattgttacccatccatggaagaagcttgttgctcaaaatttggggactttagacgtcgaaccagcattttacaaatctggcacaacgagtagcacaggtgctttgaattatgtgattactggtaatatcatgcatgttagtggcgctgtttctccaagtaatgatttggatgctggggcggcaacggtactgtttaacttaccatcttctatcggaaccattgcagaaaatgttgctgtcgttcagcaatcatctggctggaatttgtattgtctatcctggaatcccaatggtgcggtatcagcaattaaacataatactagtgggaccgcaacggcaattacgactacgacacagttacaagtttctgctgatattttgttgaagtaaacaggaggtagacaattgaatattaagaagtttcgggtactcatggtaatcatgggtgccttttttcttgggctagtcatcaatcaggtatccatgcaagcagctactcgtacacaaggtgttgattgggcaaagttccaaggtaatactggtaagttcgggtatgattctgacacatttgttttctcacaggcgggtggcttttatggtgggactaatatccctcagaccacgtataacagccaagttgccagtgctaaacaggccggcaaacgggtacacacgtatttgtgggacggtgttggtggcaatatgaccaatgctaaggctatgatggcctattacttgccacgtgttaagacgcccaagggcagcattgtggcgttggactatgaggacggtgcttctaatagcgtgacagccaacactaatgtcattctagcccagatgaagcttattaaagacgctggctatacgccgatgctgtattccggtaaagcttacctcaatgctcatgttaatgtgagtgccattgttaaaacctatggtagctgtctatggttagctgaatatccggactacttggttaggactaagccggattataactggtttccaagtatggacggagtggctatttttcagtttactagtatgtataaatcaggcggattagatggcaatgttgacctaacgggtattaccaagtcaggctatacgactgctagcaagaaacaagctcaaaccaacgttaagaaggctcaggcagctaagaaggacacctttaaggtcgttaaatacaaccagcgaggggtgttctatcctaatcggactctggccgtacgatacacggatagcgacaaagttaatcaagtggctacctattacaagggtgagagtgtaacttacaacgcggttattatcgaacacgactatgtatgggcacgttacacccgttcaaatggtctgtatggatttatcaagttaggtgtcactaatggtcatgactacgggaagcgggtgatctactaatggcccaatacgatgatacaaccaagttattaatggatattcaaaaggatgtggctgccaccaaaacgaaagttgagaacatcgaagaaaagctgaatcaagttgacgatattggcgacaaagctgacaaggcactggccaagtccattgaagctagccatcaaatcgaccgagttacaactattcaaaattggttgattggtgtcttggttagtggcgtgttagtcacgttagttatttatgtcgcggaaaagttcctttaggggggaaaataatgacaaaatttttaaatgtaattcaggcaacattcaaggctaattacaagaagcccgcttattgggcccaggttgttggttccgtgttgattattggtttggcagtagcaactgtctttttgggtattaagattgattccaatgcaattgttatggtaatcacggctgccggtgcagtgttggcttttgttggtgcgattacagacaattcaattttggaagatacaggcaacacgatcaagactaagtcgaatgtgctggcctctacggaacaaacggtcgtggaagccctggcagaagcccaggctaagattgaagcagctaattcagcagcggctagtcaatcagaagcccaagcgtcacaagctgtggtggctgcttacagtcaggccgctagtgctgcaactactggcgatatggtaactgcccaatcggccgctagtttggcggcctctctgggagcaagtacgaccgtcagtgcggattcatccgcaaacaagacgtcagaacacgcctgatagcacatataaaaaagacctaacatcaattgtttgttgatgttaggtctttttttagtttaaaacatccgttcaaaataatgttttaacgagtcagtagggtatgtcttttgtctgtaagagtaacgcaagctctttgcacctaccactgtcagtatacacaagaagtaggttgcccattatacatcgtttgcaatgagcagagatgtttgtactttattctcagtcaataaacaattagcctattatacgacgagcaaaggttggttgatagtatttgatagcagtttctttaactccttcttcaggtgtcgcagcatgaatcatcataccattaccttcatacaaacccacatgataagtatttcccctactaccatagaataacaaatctccaggctgtaattcatttaaagaaacttctcttccagaagtttcttctgtagtagttactgtaccgtttagcgttattccagctgcagttttatataaataatagacaaatcctgaacaatcaaaagagtttggacctagtctacccgcttgggattgagtatagggatcccctaacttagttctggctagattaataattgccatttgacgagatagacttgatacctgtgcattaccgtgactatcacaataatagctagtattaccaacataggctgttttattacgatattgaatatggtcagtaccataatattctaattgattattaccatagtgccgtagaccggtaatcgcatcgccatcactgccaaagaaataccatgtattttgatcagcttgataatatctattacgatattgaacatggtcagtgccataatattctaattgattattaccataatgccgtagaccggtaatcgcatcgccattactgccaaagaaataaacagtattttgatcaggttcgtaatacttattacgatattgaacatggtcagtgccataatattctaattgattattaccataatgccgtagaccggtaatcgcatcgccattactgccaaagaaataaacagtattttgatcaggttcgtaatacttattacgatattgaacatggtcagtgccataatattctaattgattattaccataatgccgtagaccagtaatcgcatcgccattactgccaaagaaataccatgtattttgatcagcttgataatacttattacgatattgaatatgatcagtaccataatattctaattgattgttaccataatgtcgtagaccggtaataggttgaccgtcactacctaaaaagtaaacatcgttaccaacatatttataactattgattaatttttcactttcatttgtgaccatcaacgctgaactaaatgcagctactttagttgtatttgagctcgagggagcagtgctgtcagctgcagcattagacgaatttgtagattcagaattagctgcagctactttagttgtatttgagctcgagggagcagtgctgtcagctgcagcattagacgaatttgtagattcagaattagctgcagctactttagttgtatttgagctcgagggagcagtgttgtcagctgcagcattggacggatttgtagattcagaattagctgcagctactttagttgtatttgagctcgagggagcagtgctgtcagctgcagcattagacgaatttgtagattcagaattagctgcagctactttagttgtatttgagctcgagggagcagtgttgtcagctgcagcattggacggatttgtagattcagaattagctgcagctactttagttgtatttgagctcgagggagcagtgctgtcagctgcagcattggatggatttgtagattcagaattagatgatactgtttctgttgtatttgtgtctgatgcaagagcggtaacagtgccactagaaatggtaataatacttgttgtgccagcaaataataatatagctgccaaccatttctcctttttttgtaaatattgacgctttcctttagtcatgattcttccttcttccattgtcacgaataaattgtagcgcttttgatgtggaatttatagagataatgtgaactatttgttagagtaggtatactgctgatagatagtatatatccagtaactgcatcataggatcctactctacttgctaacgaacggcaatcggtaggtgcgaagggggacttgtgctttccgacccgcgcaagtccctcctaagttcaaagacaaaccaagatattggaaaagcaagtgcacactttgaaaattagtaaaaaagacaaaccataaatattcaatgttcttgctctttcacgtttcgtgcggaaaattttttataactgtattcaaaagtatacatttctgtcttagagacaaataaagacaaatttttaaaattagtagtgctttttaatacaaatgaaaaaagctcgaatcccgttaaatcaacgtttagtaggattcaagctttatctaatttaccaaattatgccccaggcaggattcgaacctgtacattgtttccaatacagcgacctgaacgctgcgcgtctgccagttccgccactggggcagttgctttaacaacaatatccattatagcgaaaagtaacaaaaaaataaacctttttctatatttatgcagttgatattaattgtaattgtaaattggttgcttagttactggggctggccttaattagcatggaataactgtacgccgaaatactgaaattactaccggcaaaaaatgcatccaaaaagtcacccatcccagcaggttcaacgacactgcttgaatgggtgacaacttgtctgtttattaatttgcttgtttggtcgtgatactaccatctaaataaacaaagtaactattcagataatgcccccggccgccattagccgttttctgataagcatcgacctgataatagtggtggccgtgtgcatcttgattggcagttggtacgacaccaaaggtttgttgcttgggatcgttgagcacttgcccgacggcggccactgcactagttgcgctagtgatatggtcgtcagcagcttgataatggtcaccagattgcttcttagcactagcatcagccgccgcattggcacgactagtttgctccgcgcggttagcggctgcaactgagttcgcttgcttagtggaaatacttggctcagcttgggaagtgcagcccgttaaaaggaatagggcgcagaaactgattaaaattgcccgggtcacgttcggacctccttatttcgtttgttcttgggacaagctcggataaggggcttgtcggatgatgttcgaatcaacgatggtcatcacaccgattgacagaagtaacaggatcactaagattaattttttcattaaaataacctcacttgataacggtgattgacctatttccagttagggacccaaatgacgcggtcgatttgttcaggaatgaccgtaatcttggacccagtctgtggcccagcttggacgtcgatcacatatgagatcggaccagcatcaacttcaacaattgagccacgttgaccgtcgacggtgtcgactaaactatacaatggaatctcatcattgctgatttccatttcatataaggtgaattggaggaagtaggactttttaccggtcttgatttttaagggggtgtcaatggcaccgtaatcgggaagggcccgattttgagcgttgggatcattcaggtactgcatttcatcgacagcatcgatcgccatcttccattcaccaccagttaaattagttttggaggagagggtcatgaccgagttagcgtaaatgtcgatcacgttgaaggcttcgtcgacctgctttttcggcagatagccgatggtatagccatgctccgcaacttttagttcaacccgtacggatcgctcagcaccatcaacttcttcaactaactgaatttcaccgatgttagcgttagcgtcgacacggtacttcttggcatagagataatctgctttcagaccagaatcattatagccaccataaggtttaaagtaacctcgggcactcgcatcggccagcgcggcttcaaattctttttggtagtaatctaaaccaatgacgtatgagcggaaaattgcacgcgaattagcgttgatccggcgcgtctgaggaaccgccaccggatggggaacggcttgattcaagcgattccgaaaaccgttattttgagtctgcaacttggtaatttgacggtcttgttcctgattggtcaaagtttgatgaacgaggcgctgccgaattgatttaagcaacgcggcctgtttatccgccgcctgattgacatggtggagatggactaacaccgcaattaagataatgattaaaattagacaggctaagatcagcccggcaataaataaataagttctcataaataattcactccaaaaagaattgcagattagtttaagtataagcgaccagcccactaagcgccaatttaacggctgagcttgtcagggggccgataacaaggtatgatattgctattgtataatatttttgagctagaagaaacggtggcgaacggcgtgcagtggttgattaaaatctaccatcaatatcaatatttttggaaatacgcactgtttggctttatggccgcgctggtgaacgtcttggtattctgggtgctacactcagtcttggcggaacactatttattttccaacacaatcgcatgggtgctagcaactttgtttagtttttttaccaacaaagcggtggtctttcagtccaaatcgcaagacttttggcactggtgtcgcgagttcattagtttcatgttgacacgaggcttatcatattttttcgatactttcctcatgttcgtcggcatttcgttgttgttctgggcacccctacttgttaaaatcatcgaccaggttctcgtgggactctttaactatggaacgtcgcggctgatttttatggaaagcaaccagaaaatgcgaatgcgccagcaaatcatgaaacgtttgagtgatcgtaacaattaattggcatcaggcaagcaagtcgtcccctaacggacgacttgctttttttgatagcatcactttggatcgttaggcagtaatttcaacgacattgatggtttaaatcaagtttcccgtcaattgccagtgcaagccgatgccacaaataatcgttagtaaggtgccgcagacgagtagggtgacaagtccagagttcaaatgactttcctgcttgcgggcaaaggccacttcaatgaggccaatcgtgccaagaccgagtatcacttttagcaaggtcaaccaccagttgcctgataaggttctgattgccaaagccaccccagtgatgataattagcaggtacccgatgcgactaagaatcaaaaagcgattggctgatttgactgagtgacgactgagaccaatcgcaaccgtcagcatgagccatagccaaccaataatgtgccctaataagtacatgacaaaaccgcctccacatttacaattcatgtctaattttagcatgaaagtaggtgttggcggcggtttcttttattgtactttaattaagtttttctgttggatgtaatcgactaattcaatgaccgttttaaagcggttaaacggtgtgacgatgtgaacgccgttgaagcgcgcacagataccatcaatcaattcctttgcaatggcaatgcccactgcccgttcgtttccggtttgttcggcttctgccatgcgtgtcaagataggttctggaatccgaatgccatggacttcatggtgtaggaattcagcattacgccgtgagacgagtggcataacaccaatgaacactggcacgttcacgtgattagccgctagagcatccgccaaagcgtcaacatttgcaagatcatacacgggttgggtgataatgtagtcacaaccataacttaacttccgactgattgacttggtcgatatggaagtgcgataagcgttaggattaaaggcgcctgcgacccgaaagtcactggcttctttaagcgacttacccgttggtccgatgccgctattgaattgcttgatcaacttcatcagttcaacggagcgcacatcgctgaccgaagtggctcccggaaaatcaccgagtttggccggatcgccagtgatagctaagatgtcctcaatacccaggctgtgtagacccatgatctctgattgtaagccgattagattgtggtcgcgggtcgtcaagtgcacgatcggcgtgatgccgtagttcaacttgagctgcgccgcaatcgtcgtattagcaatccggaccgttgctaacgaattgtcagacagtgtaatgccatcgacaccagcggcttttaatcgttcagcaccccggaaaaatttagtcgtatcaaaatcgcggggtggatcgagttcgactaacgccgttttttgggtcgcaactttttgcagaaaccggtgctgactctttgtcgtgacgagcgttggtggctgtggttttgtagccggctggtcatgagcaacgatgctgcgattacttagaccgcggacgcttgcgctggtatgcaaaggtgtggtcccacaacaaccaccaataatgttcagaccgagctgacgaaagcgttcggcatattcttcgaaatagcttggttcaccatcgtagaccaccgcaccgtcctgatcagtgccaggcaagccagcgtttgggtaaacggctagtttgacgttagctggaatcgcaaagttttcaaatgactgagctaaatagtaaggtcccaggcgacagttcgtgccgattacgtcggcgccggcagcgttgagttggacgatggcatcagtgaagctcgtaccgtttcgtaagacgccgggggctaacattgaaacattcgtgatgacgggcaagtcagtatgggccttcacgatttttaacgcggcgagtagttctggcaaatcataatatgtttcgagcaagatgccatctaactggttggtggctagaagggcggtaagttgttcagtcacgttggcagcaatcgttgctggggtcgcccgttgaacagttgcatcggtatcgccggctagtccaccgatcgttcccagaatgtaaacggggtgatccacgtgttcccgtgcggtcgctgcaattttcacagcggcctgattgatggtggtgacttggtcttgtaaatcataccgggtcaactttaggcggttcgcagcgtaggtgttggtttgaataatatcggcaccagcccgaatgtacgatcggtgaacgcgtaaaatcgtgtcgggatgcgtcaaattcaggttttcaaaagccgaattgatgccataattaccatataaaagggtgcccattgcgccatcggcaacgaggacccgttgctggagtgcttgtttaaacttcattcaagccacctccttagtggatgctagtggtcagttgggcctggatcgcgttgcgcgcagcaatcatgttctttaaggctgctagggtttctgattcttgccgggttttgagaccacagtcaggattgatccagaattgccgggcgtcgataacgcgtaatgcgcgttggatgttggcttcaatttccgcaacgctcggtacgcgtggactgtgaatgtcatagacccccagaccgatttcttgatcgtacccggtttgttcaaaagcactgataatctccccatggctacgggacgtttcaatcgaaatgacatctgcgtcaagggctttgatggtattgatgatatcggcaaagttagagtagcacatatgggtatgaatctgagtgtcgttttgcacgccggtcgtggtgatcttaaatgagtacactgcttcatccaaataggcttgccaatggcgctgcttgagtggcaaaccttccctaagtgctggttcatcaacttgaataatcttaataccagctttttccaagttttgaacttcttgccggagggccaaagcaatctgattttgaacctgcgccctagggatatcgtcgcgaacaaaactccagttgataatggtcagtggtgctgtcaacatgcctttaaccggctggtcggttagactttgcgcgtaaacggactcagcaacggtgattggttccgtgtaagcgacatccccaaagataacgggtggccggacgcctcgtgaaccgtatgattggacccaaccattttgggtcgcatagaagccagtcagtttttgaccaaagtattcgaccatgtcagtgcgttcaaattcaccgtgaaccaggacgtcgaggccgaggtcttcttgcagcttgatccatcgtttggtttcagcatgcaggaatgcctggtaatcggcatcggttaaattacccttgcgccatgctgctcgctttgctcggacttgcgcactttgcggaaagctcccaatcgttgttgttggcaggaggggtaggtgtaaccggtcgtgctgtaacttaatccgggtcgcaaatggcgcctggcgttcgaatttttgattactcagttgcgcttcagcggcgcgaaccgactggttgttgcggtgactggactggttgagggcggtcaagttggcctgattatggtcaaacactgcttgaacagcggcaaccccctgattggctgccacggttaaggtatgcaattctgccaatttctggtccgcaaaggccaggccgcccagtaagacggggtcagccttggtttcatttttggtggtaatgggaacgtgtaataatgagttggcgggttggagccataactgatcatcggtcacgatttgccgtaactgttgaactaatgcaagttttgcttgtagatcactagcccagacgttatgtccatcaataatgccagctgcgagaattttgtcggttgggaagccgtggtcgaccaagtgcgccaggttttcaccatggtcgtgtactaggtccagtccaagtccttggattggccaggtcacgatttggtcgtactgatcaagactgtcaaaataagtttggagttcgatttttaaggatgggacagccgcatgcaaatgttcaagtgcagtttgataaggtgcgagttccgcaaccgtcgttgttttgactagggtcggctcatccaattgaatccattttgcgccagctgtcgctaattcttcaaacacttgttggtaaagcggtaataactgcggtaatagttcgttgacggcggcgtcatccaagtactgtccgtgacgtttacccagtttaaggaaagagatgggacccagaatgactggtttaccatcaatgccaagttcttgcttagcttcttggtagtagcgtagccagcgattatctaataacttaaaggacacgtcatcgaattcaggaacaatgtagtgatagttgatattgaaccactttgtcatttcggccgccacggcggtatcagttccacgggcaattgcatagtagtcgggcaagtccaactggtgatcgaagtgaccaaagcgacttggaatcgcgttgaatgcgactagtgtatctaaaacgtgatcgtaatccgaattgtctgcgaccggaatatagtccactcccaagtcgcgttgctttttcaagttagctaggcgtaattttttagcagtggcgtgaaaggtcacgttgtctaattgtcctttccaaaagtgttccaataagtgcttccattcacgatgttcacctaaacgtggataccccaagttactattaataattgtcattaaaacccactccttatatttagcaaattattttaaacgaaaaaacgacaacctcatcctgattaaaggacgaagttgtcgttcgcggtaccaccttaatttgtcaacacctcacgatattgacctcaatccgtacgtttcatacggaagcttattaacagtagctaactgtcatcacctggcaaaagctcagtggtgccgtttggaggccatttttcatcaatcgtcttccggtttggtttgcactattccaaactcactgcacgggtagcgatgattactttcctcttcaggacgtttacatgttttgtgattgattagaaaataccaccaatttctaatttagtcaaattattttttaatcttttgaacatattcaaggcgtaatgtgacgcacacgctatttggagccaggcaagtaggaaacgtagtgtgaacagccactagtctttgccagcaaccgttgtcggatttcgaccacttgagctggtgaatagggttgaaacgcagctcccacatggttgggttgacattttaggtcttcataacaggggcgttgcgctaagcattcaattaaggattaagttggttaagggtgctgacgatattgagtgaaatcaggtgctttggtaatcaatgcactggtataaagggattttaatagtcctaaaatttgaatatttcatcaaaactgtggggagatgtcctaatctacacccagcagattaccgggtgcgtacttgctaaaagcactaaatttcatgaaatcatcatatttttttcgagttaagggtacttattttcacaattaacttgctagtatatttggtgagcccactagcgaagcaccaaagatcgaataaataataatgattaggatgatgaagaatgagtcaaagcttatggcaacgattgtttaatcaccgtcaacaaacgaagcaggccgtattaattcttgggagtggccgttccggaacatcggtaatgactaagtgtgttaatttgatgggcatttctctcgggactgataacctgctggcacctagtaagcggatcaatccgaaaggctattttgaaaataaagatgtcatcaatattcacaagtcacttggaagtcgcatccggtaccggccagccttcaagggttactatgatagcccgaagattaaaaaggaccgggcggcgttaaccacgtatctacgaaacttttttgagaatgaacaatatctggcgattaaagacccacggatgaatgattatattgaattgtggcaacgtgttttggctgacgttgaggttcagccggctgaaatcgtcttgctacgtaatccgatggacgtggtcaattcgaatgagcgcgcctggcaccgcgataccacgctcgcaatgcgtcagtggcaagtccggacgttgctttcattacgtgataccgaccgtgagcaccgcattttagtcacgtacgaagatttgtttggtcagacgttgacgacgttgaaacgaatcgcgacccaatttaacttaccgtggacgagcgacgaggcggccctccaagcgcaaatcgatgacttcatcgatccagcactccaaaagagtgatagcggtgaaaatttagctgattttgaagctcgaacggacgtggaacccgatgttaaggcactttacttactaggccgtcaagctgcggctgacccggattactttgcctcggctgaatttcaacagcgcatcgacgagatgactgacgagtatttagccaagtatggcgctttatatcgggactttaacgtcaagatcaatagcaaaacgttctttgtattcggcgaagatcaggcccaagttgatcaggtcaacacgactttacgaaatggtcaagtcaagatggtcggcacagaagctgacagtcatgaggttgctgaagatttgagcgaacggttgaataataatacgattgccattcagacgtaccccttggactatttagtggtcgagcaaaaggaagccctgaataattatctccgtaaaaacgcgaaacgcgagacgttatgggggattggggatgctaaaaacaatgaaatcgttgaaatgttaacgacggtcagtgccgagttaggtgcggatacgcacaacgtggtgattgcagatgacttaacagccatcattgatgaacgtgagcgccgattagcgattcaacatttagtacggacgttgcacgcggttgaacagccaccatacttggtcctgatggctgacgaactgggaacccctgcgtcgcaaagtgcggtgacggcttttattgctgctgaaccgactaaggcagcaccattacgagacgaacagccggacgaaacgttcaagctgcggaccccgctagacatggatgaggtggcggcaactttaacagcgttgtgtcgacgtgcgagtcaggatgagcaacaacaagccgcattgaaccattttgtaagtcttaattatgatgaaattttaaacgtgaaaggtgatcaatatgcaaacagtgtacggaattaaagctcatggtggtaagttagttaatttaaaagattttagtgaagcaacgcgtcaggctgctgagcagctgccaagtttaaccatcaataattggaatatctcagacttggaattaattgggattggtggttttagccccctgactggcttcatggtcagtgatgattaccattcagtggtcaacacgatgcacttgaagagtggcgttatctggagtgtaccaattacgctgggtgtgtcccaagcggatgctgataagattgaattgaatactaagattgctttgaggggcgctgacggcgtcatttatggcacgatgcaagttgaagataagtttgttccggacaagcaattggaagcccaaaacgtctacaagaccaccgacgaagcccatccaggtgttaaacgcttgtatgccaatggtgacgtctacttgggtggcgcaattaaattgttgcataagccagatcatggtgcttttagtgattattatatggaaccattagaaactcggaagatgttccatgacctcggctggaagcggatcgttgggttccagacacggaatccaattcatcgggcgcatgaatatattcaaaaattagctttggaaaacgtcgatgggttattcttaaatccattggttggtgagaccaaggcggatgatattccagcagacgttcggatggaaagctataagacgattctgaagtattactatccagaagaccgtgttcggttggtcatttatccagccgcgatgcggtatgctggccctaaggaagccatcttacacgcaatcgttcgtaaaaactatggttgtactgattttatcgtcggtcgtgaccatgctggtgtgggtgactattacgggacctatgaagcccaagaattaatcacttcggtcgaagatgagatgggcatgcacttcttcaaattcgataattccttctactgcaaaaagtgtggttcaatggcaacgcagaagacttgtccacacggtgccgaagatcacatttcattaagcgggacgaaggtgcgtaagatgctggctgatggtgttgtaccaccaaaggaagtttcacgtcccgaagttgcccgggttctcattgatgggttgaagcgtaaacgtgaacagcaacaggaggtctaagcatggtaaaatcagataatattacttggcatcaatcgcaagttagcaaggccgaacggcaagcgctgaaccatcataagagtgtggttttatggtttactggcctgtccggctccggtaagtcgacgattgcgaatgccgttgaaaaagcattatttgaccaacaagttggtagttacgttttagacggcgacaatatgcgttttggcttgaataagaatttaggcttctcagctgaagaccgtgaagaaaatattcgccgaatcggcgaagttgccaaactatttgtcgatgctggcgtgattacgttgacggctttcatttcaccatatcgggccgaccgtgataaagtgcgggcgaaccttgaggtcgatgagtttattgaagtgttcgtcgacacgccgcttgaagtttgtgaacaacgagatgtgaaacaattgtacgcgaaggcgcgtcgtggtgaaatcacgggctttacaggcatcgatgcaccatacgaagcacctatcgatcctgagattacgattgacacgtccaaacaaccactgaccgcttccgtccaacaagtattgaattacttggcggaacaccattatgtcagtttggttactgcaaatgaaaactaatgcaatcattactgacatcacaaaatcgattgtgaaaatggaccgaatcttggtctatcgtcatacgaatccggatcccgatgcaatcggggcacaatttggactagtcgccttgctcaaagcggcttacccggagaaacttgttgtggcgatggccccagttccgggccatttggcgtggatcgatacaaccgatgagcagttagtgcccccccaagcaacggacttagtcattgccgtagattgtgctaaccatgagcgcctagctggggagttgccaacaggtgcctttgtgattaaaatcgaccatcacccgaatcacgatccctatgggcaactgaactgggtcgatgaaacttatagcagttgctcggagatgatttatgagttggcgcaagcggggtgttttacagtgacggcggccgttgcaaccaagctatatgccggaattatcggcgatacggtgcgcttttcaactcccgagacgtccactcgaactctgaagattgctagtgcactcgcggcaacggacattgatattgccactattagtcaccacgaaatggacttaacgccagcactcagcaagttgtatgggtacgtcctgagtgaacaaactattgagccaagtggtctggcacacgttgtcttaccacaacggatatttagtgacttgagtctggaatatggcgatgaggatgcgcttgtcccgttgcccggtaacctgacgacggtcaaagtttggttgttcttcattgaaaccccacaggggcaataccgcgtacattttcggtcgaaagcaatcaatgtcaatgcggtcgcaaaagcgttcaatggcggcggtcatccgttagcaagtggggcatttgttcctgacctagcgacagttggacaagtcattgagcaaatgcaggcgcaaatattagctgcgacggccgtagattgagtataataaatttaatataaactgcactgattcggtttgacatggcaattgttagtcattctgtgtcggtcacgtgggttgccacgggaaggttagaccgccagtatcagcggtatgagcctaatattctggctgacaaaacgggcatatcgttggagtagcagtcgtgaggaattgattggcgtcagaaaaaatagtgagatagggtcggtgaaaggtaaatgaaaaagcgaaattggttgattgcactaattgtcgttgtgattgtcgcgattggcggtggttttgggtattacaaatatcatcagtcaactgcaacgacaacgaccactagtaaggtacgttcggcgagtgcaacgaagaaggacatcaacacgcggctagtcaagattgagattaaggcccagtcgagtgagacggcgacgctgaagaaggcggtcgccaataagaattataccgttaataacatgtacacgaaggttaacccatacggggtgtctccgttatccgccaaggtgattttccagacgagcaaggcggccaaggtcagttatacggtggtcggcaagagtagtaagacttcaatttctaatacggtcaataagtacacaacgagtcatgatttgaccgtgctggggttatacgccaacacgaataaccaggtcaagattaaggtgacttataaggatggcacgtcgacgaccaagacgatccgactgaaaacggcgaagttaccatcggcgttgaccgattttaagatcaacgttaagaaggctaacaaacaaaaaatggtcttagggactggtaattcgaagctgacatttatggttcggacgacgatctctgggagcaagcagtctaaaaacttatcgttcgggatggatgcggatggtaatattcggtggtatacaacgcggccaacttcccacattttcaaacaacttaacaatgggcatttattgatttggaccaaatcgaatgctaagaattcatattttgatgagttagttgaaatggattatacgggtaaagtttataagacttataaatttaatcataaggcctggggtaaggctaagggttctaagaagcagaaccataatcaggtccaccatgacgtaacggaattgccaaacggtgatctgattgcgaccgtttccgatggcggccggacctatgtcgaagacacgatgatcgttatatcgcataagacgggtaagatcaccaaggtcatcaacatgaagaatatcctacctgcgaagttctatacgaagtacaacgcgacgaagtccagtaaatatatgggtaagaaggactggttccatcagaactccgtctattatgataagaaggataagagcttgattatttcaagtcgcaaccagaacttagtgatgaagatcgattacaagactgaaaagatcaagtggatcttgtctggtaagaagacttcagcttggccgaaatcgtaccgcaagtacttgctgaaggctagtggtaagattgcttggccgggtgggcaacatgccgccatcgttgatccaagcaccttgggcaagaagaactcgctcaacgtgatgatcttcaacaataacgtggcagttggtacgaccaagaaatcgttggcggactcttctggtaaatattcagaaggtgtcgaatatcatattaatgaaaagacgaagacgatttctcaagttggcagttacggtaagtcattaggtaagaagaactttgccaatattattggttctaatcgttacttgagtgcttcgaatcggctaattgattttggttggttgaataatggtaaatcagctaatattattgaatacgatttgaagagcaagcaacaggtgtttaacgttgaattaacgggtcttccaagcggtggttatgtctaccgggccgaacgcttctcgttgtatccgacgaagcacacgtatggtattaatgaataagaattgaatgtaaaacgggcgcccctgactagatggctcatctggtcgggggcgcctatttgcgtgttgcgctaaccaagatactgatggcgcgatggtcgttagtagcccggtatgaaaatatggctcaatggcggactagtcataatatcggttgatcaataactgcggataatgattgccggttgactagctaggcgtcacttttgaatgcttgataatcaatatttcgtcatccacacgacttcaagcgcgtccgttcttaaaccagttgtcggcccgaaaaggtcgttttcaaagttgtgactgaacgttaatgaaaaagtcacaatttggtcgcaaaatcatccgcaaagctagaataatttcataccatgtcgcatttatgttcacattccaagtctacaatggttcttatgttgaacggcgcgacggatataggttgattatgagcagtggcgcaagactcagcaagatgaaaattagttgaagcggagcgatgacgatgaccttaaatattgcaattgttttaatcacgttattagtatcatttatattaatggccatggaagttacgaccccgaacgccataatcttgtgtgccttagcgttcttgatgtttgtcggtatcttgtcgccaacggacgcactgtcaggttttgctaacgacgggttagcgacaattgccctgatgtatattattgcctatgccattgccaaaagtaatattattacccgcttatttgaccggattctcggcgatggtcacagcgaaaagcgttccttattacggttgttagcgagcgtgagtgtgatttcaccgtttatgaataataccccgattgtgtccactttgacaccgatggtccagcgttggacgaagcagaaagggatggcaatctcaaagttcttgatcccactatcctacgccacgattctgagtgggttgttgaccgttctagggacttcgaccaatctagtggcacaaggattattgtctaagtacaaattagcacaatttggtacctttgacttggccgtcatcgggattcccatcacgattattgggttgatttacttactgacgatcgggtaccgcatgttaccgacctattatgggagtagtgttgacgatgttgttgctgaaccgaatgattacttgattgaaatgacgatcggcgatgattttgaacacctcaatcaaacggtggtcgccgccaaacttcgtaatttaccgcgctctttcttagtggcgattaatcggagtggtcagtcgatcgtgccggtgacggatgagacgattctacagttaggtgaccgtctttacttcactggaaattttgattgtattaatgatcttatgaatattaaaggtctaataccaagcactcagaaaatcaatatgactgatatcaccaatgaacgggttcggctcgtcgaagtctccattccggacacgtccagtttggtgaaccaaacggtcaaatcagcgcgttttcgcaatgtctttgggagtgtcgtcgtcgcaattcgacgcaacgatgtcaacctcgaagggcatctcggaagtattcgcttaaaaggcggggacaacttggtcatgattaccactggtgaaccagacgagctggcaagtctcaaagacttacacgtctttaattcacaaccagtgaagtcccggaaacatacttataaggatgttttaccgattgttttattggttgcaacgatcatcgtgtcgactatgggcgtgattgatttgttcgttggtctggcggcctcgtgcgtggtacttttcttgacgaaatgcgtttcaatcagcgatattgtgaaggctgtcgatatgaacgtgttgtttttagtggctagtagttatggacttgggcttgcgatgtcgaacgtgggtgctgataagtttatcgcgaagtcattggtagcaattaccgggaatgcgtcaccaatcatctatatgttcctgatttatttcgtgaccaatttcttaacggccatcttgtccaatgcggcggcgttatcactgatgtttccagtggtcgtttccgcagcgaagttggaaaacctacccgtgatgatgcttgttatgttgattacgattgctgcgacggcggacttttcaacgccaatcgggtaccaaacaaacttgattgtttacggccctggacattataagttcacggactactttaaagtcggaattccgttaaatttgatttgtatggtcgtttgtgtgtttgtgtcctattactattatatggtgctgtgatgtgacttaatcgaatctaaaagacttgtgagcggctgctgacaagtttttttgtgttggttagtaaatcggtgacagcttagcacagtgaaataaccttaaaaaataaatcaagacggccaattcactaattaaaataaaatatttaatatttacgaacaaaggactagtattataaatctaaagttgatatactagcaaagtttgcttgtctggcaaagcaccaagaaaacgattacaagtgcgtcatcttaattaatgaaaggagtgcgaaaatgaacgatttaacaaagggaaaaccgctaaaattaattttttggtttacgattccgttactaatcggtaacatttttcagcaattttatagtttatcggacacgttgatcgttggtcagacgttaggggttaaagccctagcggcggttggatcaactgggagtgttcagtttttgatcattggctttgcgcaggggttaaccgctggcttatccatattaacagcccaacattttggggcacgtgattttaaagcagtgcggcgcagttttgcgattagtatcgtagttagtctaattgttgggatcattttgacgattctgtcgttgatcttcgttgaccatatcttgttgttaatgcaaacgccaacggatatcattgcggatgcgcggacattcttacaaattatgcttggcgggatgctggcaccaattgcgttcaacctgttgtcaaacatcattcgcgcactcggtgatagtcgcacgcctttatggtttttgattatcagcgcgttaattaatattggcttggaattgttattcattttggttttcaaatggggcattgccggggcgagctgggcaaccattttagcacaaaccattgcaacgctcatgtgtgtggtttacatcatcgtcaaagtacccatcttgcacattggacggcgccacttcaagttagtttggtcggaagtgaaggctcacctgaatgttgggttacccatggcttttcagatgtcgatcattgcgattggaacgattgtgttacaagcggcactgaatagtcttggcactaattcagtggcggcgacgactgccgctcagaaaatcgaccaagtcgcgactcagccattaatgtcttttggggtcaccatggcgactttcgcggctcagaattatggtgctcatcagtatgaacggattatcacgggagtcaaacagaccatgtggctgtcggggagctttagtgtggctgctggtttgattgaaattatctggggtaaacagcttgtggggttcttcgtcggtcatcaggacatggcggtattgaacttatcccagacgtattttaacgtcatcgggagcacgtatatcctattatcaatgttatttattatgcgtaataccttgcaagggcttggacgcagcgcaattccaactttggcaggcgcggcggaactctttatgcgggtgtttgcagcactgatcttagttcggatcttcgattacgccggtgcttgtagttcggaaccgttagcttggttagggtcgtgtgccgtgcttttgcctgcttatattaaatcagtccacgatttacgacaacaggcccgcatgacaaacacggtcgcagaaggggccgaaccaatattaaacgattcggaaaaattgtaattaaggcttgcaaccaagtggattatttgataatatttgttatcaattttattttaaagtcactcatataatctcccggacacctgtggacggggcatgaattgaaaaacgttaaggagtttacaaatggccgtagaattaaaaattggcgattacgtcgctggtaagaagtttgcttcgttggaacatgatttcaagggtgaaattgaaaaagtgtatgaaaattcagtcttgatcttaattaaggaatttcaaaaagctgacgaaccaattgttaacgagtataaccaccgtgcagttgttcgtaaggatgatgctaagctcattaaagcggcgccaaagccgaaagtcgtcccagaaaaagaagactaaaaatttataaataaccatgacaacagaaaaaatgtatgctatactaatttctgttgtcaaatgcgggtgtagtttagtggtaaaattcaagcttcccaagcttgcgtcgcgggtccgattcccgtcacccgctttgctattaatcatttcggttagtagtcattgtattctcaagctccttgagcgcatggtccgttggtctagttggtttaggacgcctgcctgtcacgcaggagatcacgagttcgagtctcgtacggaccgtcaatagatgatgataatcaagaacgttagtcagcaatgacccgttcttttttattgagtaaaaatcaagatgactaaatagttgaccgaatgggtgatcaacagtaatcgttaaggagcgcaaatgcaatttataacaacatctttcgatgagttaactgttcggcagttacaacagatttacaagttacgagtggcggtttttgtcgtcgaacaggcctgtccgtatcaagaagtcgacgatacggacttgatggcttggcatttacgggggatggattcaacgggacagctgctagtatatgcgcgattaatgcgtgaagccaaccagcaggcccgtatcggccgggtgatcactaatccgatagtacgggggcacggctacgggcagcagttgctccaacaggcgattgtgcagattcaagcgttgtggccttccacgacgcaaatcaatattcaggcccagcattacttagatcgcttctaccgtggatttggttttcaaccagtctctggcgtttatttagaagatgggattccgcatcagaatatgattttaacgttgaactagtcaaaacggctgaattctgttatactaacgcatggtaaaaatatatacgtctaatgagaaagaatagtacgatgaacgtttagaccagcgagttcgggatgatgggagccgaatctaaacattattggaagcgcgcttttgaagacgacaattcgataataagtggatgtcatatcaattagagtggtaccgcgggcacgtctcgtctcttacatgtttttaaatatgtgagggactttttttgtcccgtaagacagtcaaggaggacaatatggattataaacaactcgtcgcagcggccttagcgccagcactaccagatttaacgcaggaagcgattctagataagatcgaacaaccaaagacgtctaagcagggggacttggcctttccgaccttcaccttagcaaaaacgttacacaaggcacctcaaatgattgccagcgacatcgtcgaaaaagtcgatggcagtgactttgaaaaagttgttgcaatgggcccgtacgttaacttcttcttcaagaaagatgcgtttgcagccgatattttaaatcaagtattgtcgaatggtggccattttggtgatgctaagctcggtgaagcgggtcaagttcccatcgatatgtcatcgccaaatattgccaaaccaatctcaatggggcatttgcggtcaacagtgattgggaattctttggcaaatattttaagtaagttggattaccaacccgttaagatcaaccacttaggtgactggggcacgcagttcggtaagttgatcacggcctacaaaatgtggggaagcgaagctgaggtcaaagctgatccaatcaataacttattaaaatactatgtacgtttccataaagaagacgtcgatcatcctgaaatggatgacgaggcgcgtgaatggttcaagaaattggaaaatggtgatgaagaagccacccatctgtggtcatggttccgctcagaatcattgaaagcgttcaagaagatttaccaacgcttggatatcgactttgattccttcaagggtgaggccttctacaatgataagatgcaagaagttgtcgacatcttggaagacaagcacctcttgcaagaaagtcaaggcgccgaagtggtggacttaagcaaatatgacttgaatccggcattgattaagaaatcagatggcgcgactttatacatcacgcgggacttggccgctgcgatctaccggaaacggacttatgatttcgtgcagtccctctacgtcgttgggaatgaacagaccaaccactttaagcaattaaaggctgtgttgaccgagatgggctttgactgggctgaccagatccaccacattccatttggtttgattacttctggtggtaagaagttgtcaactcggagtggccgggtcatcctgcttgataaggtcttggacgatgcggttgcgttagctcatgaacaaatcgaagccaagaatccggacttgcctaacaaggatgaagttgcggatgcggttgggattggcgctgtggtcttccatgatttgaagaacgaacggatgaacagctttgactttaacttggaagaagttgttcgtttcgagggtgaaactgggccatacgtgcagtacgcccatgcacgcgctgaaagtatcttacgtaaagctggtagcccagaaattgcggcaaccgagcaaacgttaagcgacccagccgcttgggataccttgaagttattgagtgaattcccagcgactgtagtacgtgccagcacggaatacgaaccatccgttattgctaagtatgcgatccacttagccaaggcatacaacaagtattatgctaacaccaaaatcttagttgaagatgatgaattaaacgctcgtctggctttggtcaagagtgtcagcatcgtcctgaaggaagcccttcgcttacttggcgttaaggctcccgatgaaatgtaattcgaattaactgttcaagtttgaacgccacgcatgctataaaacggccgttaaagccgagttagcatgcgtggcgtttttttggttgcggtcatagcggcacagaactcaatgcaagttgtgaaccaatcgcagaaatcgcaagtaggtagcggaggcccactattgtaactggaaccagacttatcgtgtgaagtggattatcagtcgacggatcaaggctttaccgccccggccgagtaaaatgatcccgatcaacggccaagatagtaacaataggcaaccatgaatgacaaaggaaacactgatcgatatcatatcgtcacgatattcattttgagagagcaacatatcacggctactgacgggattgacggcgttatgataaatttgagtgattgtttgatgttgacctgtcgcatcattcagggcacgtgaagcgactgaagtcattcgaaaggggttatgggcaagtcgtggcaataggcacattaggagtggatggccgaataagtatgcggaagtcagatagaggttggttaacgtccaatgtaggtgaaaccggccgctggggtctgcggtgacggcataaaaagcaatcacgaaaaaaatcgcgcaacgaatatagtcggaaccgattaagctgaaagcctttttcatggttatccctccgtttgaggcttggctgtgttttcttcagataaatgctcaaactgggttgcgggcgtcgtgatgcttacaaatgaccgcccatccgagttagtgaaaccaagcatgatttatgtctgattataagtcggtgtgatgatcgaaacaaacattaaaatcttaataaggcaacttccaatactaaaattttaatgacctgtttagtcgtccggggtggtattctgaaaactaattcaaaatgccatattgggggcttggtgatgagctacttagaactaacaaatatttgtaagaactatcaggttggcaaacaaacattcaacgtcttgaaggacattaacttgcagtttgaactcggtgagtttgtggcgattgtcggtgaatcaggtggtggtaagacaaccttgatgaatattattggaggactagaccatgatttcacgggaaccgtcagtatcgctggacacccacttgattatcatcatgagcgccagctagatcagtaccggcgcgaagtcattggctatatctcacagacctacaatctaatcggtcatttgaccgtgcttgagaatgtcatgctagccttagatatgactaaattaagccatggtgaccgattgcggcgggcacacgagctcctagcaaacgttggcttgacggcacaaataaaaaaatacccgcaacaattatcaggtggtcaaaaacaacgggtggcaatcgctcgggcattagccggtgatcctaaaattttgattgcggatgagccgactggtgcgctggatgcagacaataccgccgatgtcatggccatgcttcaaaaaatcgcacgggaagggcgcttggtgatttgtgtgacccattcacagcgcgtggcgggtgcggcgacccggattgccgagttggtgaatggacgaattaagtcacaaccagtgaccacccaaaatgtcggcaccacgcaaacagttgcgtcactacctgcgcggccactatcgtattgggtatcagtcatgatggccttcaagcatatgcggcatacgtggatctggaatacgctaattgtcgttggcacagcgattggattattcgccgtcatgcttttcaatggtctggggaccggcataaaagggtatattaatcacgaaatgaatgcgttggtggacccacaatcaattatggtcatgcaccaagcggataacgcgaaggatcgtgatgaacaggctgcggccgtctatgatccagctgtagccggcggtatcgcagcccggatgccggtgttcaccgactcacaactcacagcgttgcgtgaccttaagaacgtgaccaacgtggaacccgggatttcagctacaaacgcaacgattgcgattggacaacaaaagtatgccgcacctgaactgacgacctggacgagtagtgacccgacccggcagttgaaagcaggccacgtggcgggtgacaatcaaatcgtattagataagtcttcaattgcgcagaaatggtcggcaacgcgctggcgtcagttagtgggtcgggctgtgactgtgagttatcaaaccttcaatcaaaaagggcaacccgtgaccgtggcgcgtgtgttgacggttgccggaatagtagatagtacctctgaggtcggtttgaatgcagttaactacaccacgatgcagtcgatgcgttcagcagcacatgtctcaacacagccaacgtttgtgaccgttagaattaagagtcgggtgcagaatcaggtcgtggtcaatgaaattaaccacttatcaattaatggcaagcatccatttgccgcgactagtattgcggccactttggattcgttcaatacttacgttaatattgccactaaagtgttggcggcgattgcggggatttcattaatcgtttccgcactaatgattattgtaacgatgttcatgtcggtcagtgctcggatgcgagaaattggtattctgcggtcgttgggggagcgccggcgtgatattcgccggctatttactagtgaagcgctgatgttaggcattatcagtgccacgttagcgactgggctgtcttatttagctgaacgagggctcaatcatggtctggctaagctaactggcgggtatgcgctagttcagattcagctcaacaatgtaattgcaatttttataatcgcaattattatcgcctggcttgcggctattttaccagcaaggcgggctgcgcgggctaatccgatcaaagccttggccgctgaataacaagtgattggataattatcgtgatggaaaagttatgttaaccagtcaacttgtttgaaggagtggttaaaaactgtgcgggatgtcgcaaaatagtcgttttattcaggggtgggggtcattaattcattagggctggtattaacgacagcagcctgttctaatattggctcgcccagggtacgtagaaacttctaattgagaaaagtaaattagctcggctaggttctgcattactagtcgagctaattttgattaatatcttctggtcgtaggtaactgggaatggttatttggcagttagcgtgtacttgagacgtcgatgatggttctttacaaaccgggtgctagttagttaattgacataactaaacattattagtaaaaactaatttttgagaagataagtagcaatggtgaaattcaattgtatccgtttaaattgattgctatacatgttggcgcttactttttatggccaaaaccgtgtcttgtcaaccctatgcagaattaatccatcgcccacttgacttattcaacgagtgaattaattcgccaacaaacttatcagtgacttctcataaaaagcccaaagtcccccctgttatacatgcaaaacactagtaattcagcgactgtccgggtatgctgttggtgtaaattaagctaaggagggttttgttttgaggaaacaaccacagacactagtcattggtggaacgcaggttgctagtggcaagagcttgttgacactggcgttagcgaacgtattgactaattggaaaatgacggtcaccatcgttagttgcaattatcaaaccgttacgtggcggaccattcaaaagcatcactgccatgagtggcagtcagatattcgaacggctaacgagctcaacaacttttggatagcgttgcagggtgtccagacggattatttattgatagatcttgattctacgggtccgaaacacgataactatacttggttactcaacgagtgctggttgccattagcgcaacaaattattttaacctattcgactgaaacggatgtcaacacgttgttgtatcaagatttaggggccttacagtttagcatggaatacacactgaccaatcctaaaatctacaccgtgttgaatcgttatccagcaccagtagctgttaggtcagcgatgacggccagtgacttactcccattccatcgtcaatttcaaactcggcacgcagaatttgctgcaatgaatttagagccattgggtatgttgactgacgcccgccagcacccagaaaaagttttggcggatgccacgcaaattttaaccaaacttgtggcgtaattatggctaattattgatcaaaacgacacgcgctgtgatgagcaacgggtgctttttttgcggatgccaatcacagcgaaatatgtacaaatctggtataaatgtagtgatgcgaattttgtgggggaaatctaatggaaacgacacgagagcttatttatgatacggtacgcaaattggttttaacggatacgcggtatcacgatggtgtgacagcaatggtcattgctacacaattgaaaatgcaacgcacaaatgttagcgcggctttgaatgccttagtgcgcaaacaaaaattggtcaagactaagacgcggccagttcaatttttattagctgcgtcccacctccaagagccatttacgggactaattggtcgtttaaatagcttgcaacatgcgatcaaactagcaaaagcggctgttttgtatccgagtggtcctttgaatattcacattgtggcaaacggtggggcgggcagtaccacgtttgtacacgaaattcagaattttgttgagcaacggggtatattaacggcagctagcagccccatcattgttaagtgtcgtgattatgcagacgatattcaccaacttgatagtcaattatttggtgagcatggccagctagcgcacagtctttgggcacactccgagggcggtattgttgtgattgaccattacgactatttagatggcccgcaacgcgcacaattgacgagtgtcatggaagccgtggcgtcccataagcaaccaccgttaatcattttagtgagcgggattgatcaggaaattcttaggacgcagcaattgataatgaaaattgaattacctgattttaagcaacgaccgtggtcagaaagatgggcgttgattcgtcgttttttgacgattgaagctcaacaatccaagcggacgattcgattggaactagccgttgcccaggcgctcatgctggcaaattatgatcagaatttgaaaacgatgaaagcgaccatcacgatggcctgtgcgcaggcttatgtccgatttatggctgatgctgaccgtgaagttcgcgtgtaccttgcggatctatcgcccgccgttcaacaagcgttagcgcacgaacgggactatcaacaagaattggcggccgtgttggcagcagctgatttatcgtttgcggccaagtcgtcttcgggtttgagctcagattcattgcaagcgagtcggcaacaagttgagccgggaacaagtcctcgcagtgtccaagtgccaaggtcagttgaacaatcaccgtcagtgataaaaccgagtatcgtccaacagcgtgcgtccaatacgcaaaatttagcacaaatcgttgcgccactaattattaagattgtcaaagactggcaaccagattgtgaacggttattggcacggccgttgaccgagagtgtgtttaatggattatgtttacacattaatgggatgtatcgccaaatgccaacgaccaaacctgcatcagcgacaatgatcacgcaattacagtcacaacatgtggccgaatatgaggctgctgttaaattagcacaggtcttagcgacaaaactagatttgaccatttcaccggctgaagttgctttattagcaacgtttttagttgcacaatcaccagtgacgcgtcatcacccggttgtgctttacgtcatgcaaggaatggggactgcccaggccctgatgcgaacaacgaacacgctcagcgctgtcagcaatacttatgcttatgatgttgacttatcagccgatagcacgatggtgatgaaggcactgaagcataaaatcagcgagattgattgcggtgcaggtgtgctagtcatttatgatatgggggcaatcaaatggatgttgacgaccattcaaggcgaactcgcgaccaaaattcggatgattcaagtcccagtgactttagtcggagtcgatgctgctcgaaagagtgcgcgcgtaatggacgtggacgatgtttatcatctagtgcaagtcgatctaaaccaactgaacgccgaaaagacaacaaaagatgaattgattattacgctgtgtcatacgggtgaggggggtgctgcgcaattaaaagattatattgaccaatattcacggttacagatgcgcgtcaaagcgttggcaattgggcatcgtgatgagttggtggcaaccgtacttagactacaacaggtttatcagattcatgcatttgtcggcacctttgatcctcaattattcggcattccgtttatttcgatggcagcaatttttgaacattcacatcagcagttagatcaagtgctgatgtttcggccggaagctggtcgctgggatacttataatcagatctatcagtattttaagacgcagttcgaatacgcagaagttgctaagttgcagcgtgtgttaccaccactcatggatgatttgacaaccttataccaactaactgaggatcaacaaattggcctgtttgttcacttgggtagcatgattgaccgtattttggctggcaagattgtgacgacaacggcgcaaacgcggaaattagtgacccagtattcgcaagattatcagcaattacgacggtgtctacggccggtcgagcagacatttaaactgattgtgaatgatgagatgattgggacgttactggtcatcttaaagcaattacactaatcttaagtgccacggataatcgtttgagattgatatcaggaaggtgtcagctttgattttgatggggagatgatggttggttctagcattgacggagcagtttttaaatgagacttaaataagtcgcttcaagcagtggcgattgcttgaagcgactatttagatggtcagcgattcgtatgaatttaaaggcctaaccgttgacaaagtatctatggttggctcggtttgcaagttgttgttcggtgagcaatgatttgttgttcgagttgcaataacttgtcagacatccgtccgagtagcagtgcttgactaaaatttctgagtagccaatggtgttgttgtggccgataactgtcaacatcttctagaaaggtcacggttgttttggtgccttcagcaatggtcgaataggtcacggttacggtatccagtggtgaaatagctgtcatttggtacttaatcccacgctgataatcgtcaatcgtaattttaatctgagcggccgttttggcggtcgtttttgtatatgtcagtcctttcttgattgacgttgctgtgagtatttcaccagtagcggcttgaatctctatgagtagttgtttttctaaccagtcataaaattccgtgtttgtgacggcaagtgtgcgaatgattttcatgattcgattatagcgagacattttcgacagttcaaggctgaaaaaaacgcgttaaaatgagtaagctatacaacccgatgaatcagctatacacaatacataaattggtcattaaacctatacactaatagtgatgaagttggatatttagtctaattcagctattatgacgccacgtgtgtgttgatactgctaattcatggaccttaaatctatacacaagcatatgtaagcgcttttgtggttaatgacaaaacttgttacgatatgtttgtcgacaaatacagaaagtaggtaaccggataatgacattagccaataatactgaaactcaagatattgcaatgacacttatcgcgtattctggtgaaggtcgtacgctggcttttaatgcgttagatgcgatgcatcgcgatgctttctccgaatctaagatgttattgaagcaatctagtgaagcactggggaaagcacatgatgttcaaacccaactactggtggctgaggcgaatggtcaacaggtttccattgatattttactaattcatgctcaagatcattttatgacgagtctgttagctaacgagttaatcgctgagatgttaaagatgtctcaaaaatttgaaaggatggtcgatttatgaaggcaatcaacgtgttattagtttgtgcgggcggtatgtcaaccagcattttaatgaaaaagttacagcaatatcgtgacgaacaaggtgttgcagggcaaatccaggcagtaggcttgtccgcgtatgaagatgtctatcaggactatgacgttattttaatggggccgcaagtggcttatcggcagggtgaagttgaggcggcaactgggttgcccgtcgctgctattccaccattggactatgcggtgggtgacagtgcccatattttcaaactggccgagaacttggtgtgatgacgagggattagtattcgggggtgaaggacgatggaacgcttttttaatagtaaactgatggtcggcttacaacgcgccggccagggacttggcaataataagtttattaccgcattacaggcagctatgatgtctttgatgggtattctaatggttggcgcgatctttcaaatcacgatgtcagtacttggaccgacgatgtttggcgtgttatcagcaaagagtattctgttagcctacttgaagattccattccaattctcaatgaattctttatcaatttgggttgttttattcttgggattccattacgccaagaatttaaaaatgacggccccaatcatgaatgcgattgacgcattatttggtttttggattgtggccggtgggttgattgtcagtaagactggaacagttagcattgatacaacctatttaggtgctcagggaatgtttattggcttcgtcgtagtttggatttccgtccgcgttgagaaattatgtacagacaagaatattcgaatcaacatgccagatgcagtcccccaatttctccaagacggttttgcatccattgtgccattattgtttaacgccgtgattttcttgggcgcatcgttattagtcacggttggaacagccggtaagtataatatttgttcgggttttatggaattactggcaattccactgagtgcactgacttcaaccataggtatttttgtcctgtgtatcttgggtgctttattatggacctttggcattcatggtacgatgattttagtcccaattgtgatgccgttagtgattcaagcggtttctgaaaatgccgcattgcaggcagctgggaagccggtggtgtttgcacctgtgatgttgttctcatttatgaccgtagcaggtggaactgggaataccctgccgttagcgctaatggcgatgcgttctaaatctaaacagctgagtgccgttggtaagctgtcaattatccccggctggttcaaaattaatgaacccatgacttttggtattccaattatgtataatccgattatgagtatcccgtttgtcctgaatattccggtagttatgttgtgtgcactcgtactatacaagattggatttttaacaccggggtggattgtaattaccgcgattttacccatgggttttggaagttatctcagtacgctcagttggcgcaacgcattgactgactatttgatgctgattccgtcagcgcttatctggtatcccttctttaaagtttatgaaaagcaactgattgccaaagaggcggcagttgaagctgaagaaaagcgggcggcagtttcgaatcaaggtaatgcgcccatgcaacctgtgaagcctgagaaagaggtgtgaatatgcaatttccggctgatttttactggggtggggctactgccgctaatcaatgcgaaggtgcttatgatgttgatggtcggggcctgactatgaaggatattacgacaatgggaggccttaatcagcgacggcaagtcacttatttgcaagcggatggtactcctggaaaaggggattcaattcctgctggagcacacggagcggtactgccagatgactattatcctaatcagactagtattgacttctatcatcgatatcaagaagatgttgcgctgtttgcagagatgggtttcaaaatgtatcgaatgtcgatttcctggtcacggattttcccacgcggcgatgaaaatgaacctaatcaagcagggttggatttttatcgccaggtgttcgaaactttgaaaaaatatgaaattgaaccattggtgacgatttcacacttcgatatgccactgtatctggaggaaacgtatggtggctggaatgaccgtcggatgattggtttttaccagcattatgcggaaacgctatttacggcgtatcgtgggctggtaaagcactggattaccttcaatgaaattaataatacgatcatgtttctggcattgcgtgccaaagccggtgatgcagattaccaacgcgcttatcaacaattacattatcaatttgtcgctagtgctttagccgtacagcaagcacatgcgattgatggcgaaaataaagttggttgcatgatttgcggtatcacgtcttatccgttaacctgtgatccggcggatgtcttgcagaatcggtacgtctgggaacaaaacatctattactgtggtgatgtgcagtgccagggacagtatccaacctatgcacgacgtttatggaatgagcatcaagttgatttagacattacggacagtgatttagaagccttgaaagccggtacggttgactggtataccttttcgtattacatgtcaacggcagttacaacacatgaggtcagtgcaactgttggcggtaatttttcgatgggcgcgcgtaacccatatctacaatactctgaatgggagtgggcggatgacccggctggtctacaatattatttggagctgatgaatgatcgatatcatttaccactaatggttgttgaaaatggattgggtgccaaggattatttgacagtagatggtcaaatccatgatgtataccggattagctatctacgtaaacatattcaagcaatggcaacggcaattcaccatggcgtcaaactgattggttataccagttggggctgtattgatttagtttctgcaggtacagggcaaatgtctaaacgatacggattgatttatgtggatcgtcaagacgatggtagtggaactctggcccgaatcccgaaggactctttctactggtatcagcgagtgattgcatccaatggtcaagatctgggtccctcggcctcaaattaaatgagtgttgctcagcagttttcgtcgatatcggatgaagactgcttttggttgttcaataagataattagccgcgtcaaacaaaacaagaggataccaccaccaagcaaggggagggtccaagaaccgagcattaagatcaaacggggtgctagcaaactaccaataacggtagtggtgtcgatgacggttaagacccccgtcattagaatattacgattgtttgtggggatttgttggatagtggtgaaaaaactaatgttgatctgtccgcgtaatgcaccaattaagaacatggtaatcataagactggcaaaggtcggccacataagtagtaagcacccaccggtgaaggccgtcaaagttagcagggattgctttgaccatcgttttagcaatagtggtgccaataagatacctgtggcgttagctgttaagaaccagctaagtggccagtgactatgcaacttgctgacgacgagccaaggaacggctactgcaatcgtcgcgtcgaccagataaccgagaacggcgtacagtaacgaccatgtcggccatgatcgatggcggtctagcttgacggtgacaaccgaatccgaggagagattggaacgtgttcggaattgccaatcgaggccggctgaaaccaagaacgctatccccattattaagattagggtagccggtgttacccatagtaatgccatcgtgacgagcattgtcgcgctaacgatggccaactggcgaatctgagtttgatagccgttgacgatttgaatatttacgggcgcaaaaaggtctggcaaaatcgttttgttactgagcttataaaagaccccaattgatttattaagaacggcgacgatgactaaactaagcaagtgatttgccaactaaccgtatttagtgcgtaataggcaccaatgaagagtattcccgtcaaaatatccgtaatgaacatcatttgtttggctgagtagtatttaagtacccgaccagctactaggttcagaccgattgccggcagcattgtcatcgccatgacgttgccgagtaactggggatcaccggtcttttcaatcgttaaccaggtgactaggtaagtaaagctatagaagccaaaaaaggtaattaacatgctgctgagatagcagagtagattatggcggtcgttaggatgtggcctaaattcttttttcattaactgacaaccaccggtgtatgggttgagatgttttcatagagccatttggcatcagcaatcgtcaggcgaatacaaccatgtgaattggcgactttaccaagttgctgggcttctttaacgatgtattgatcgttagcatcgactgggactgagtgaaataggtaaatcccatgatccttgaatgagacccagtaattggcgccttcacccgattgcgtgttaaaaaagtgttgtcctcgttcggcttggatttcaaagtgtcctttgggggtatcagagccatgtttgcccgtagaagcaagcatggtataaagggtctgatcgtggttttttaagtagattcgctgttttttgattgaaacctgaatgttgatgtcatcgtatttggccagtttgggatacggccgtgacagggagggcttgtgccagtcaacggtctccgggactggcgtggttaccttagttgctgaatgactaactttagtgattggccgattactggcaatagcctggtggtgccgggcaaataggtgtccgaatccggtaaaaatagttaagctaattgcgccaatcgtgacccagatgagctgatgaacactgattttcaaaataccatcccttacaaaaatgattttagtgattttagtttactcagttagcgaacgtttgtttatcaaaattgtgtaaactttgcatatcattttcgtaaaatttcccaaaatgagttgtgatagccattattgctggtgccacgggtaattcggaaatcggcaaattaaagttatttgcagtaaatcagttgttaattagacaatttttccagctaattaaaaaatcgccattaagcagcgtacttaacggcgatttgaatttttatttattgtaaactagcgaccttagctacgattttagcaggcgtttcccattcagaacgttcaaattcggaaacgggcacttcaataccaagctgattttgaagttctagtaacagttgtacggaacccatggaatctaagataccttcatcaaataaattggcatccatattgtttgaaacatcttccccagttaaatcttgcaagatcgatagtaccgttgctttaacatcatccatgatcaaaatacgccccttatcattattgtgaattattcagtcttcattctagcatagttttatcatcgatgatggttaatcaggtgtattaacgaaatctttacttgattaaacgttaaaattggcgtgaattaaatcagttagaattttaatcccctgttcaaagcggtcgctggattcataagaaaagctcagacgaatgtactgattcggctggaaatcgtagatactaccagggttgaagagaacgttgtgcgcagtggcaaggtcgaataatttgggaatattaatgttgtcggctaagcggacccacagataaaagccacccgtgggcgtctgccaagtcgcaaaatcgtcccagtaatgatgcagaatttgttctgccgccgcggccttcttgacaagtacggaccggaaatcagcttgatacgtttcatattcaggatcagctaagatttctgccagtacaagttgtgacagtgagctagcgccgtaatcggtttgcatgcgcacgtcagtcaagcgatcgatgaccggtttggcggccaccgtccagccgatgcgtaatcccggtgcaagggactttgagatgctaccaaaataaataacgttgccagtcttatcgagtgccttcagtggctgtggcggctgctgatcgaaccagacatcttgataagcggcgtcttctaagattggtaagcggtgttcttgtgcggtttgtaagacctgttgacgtcgctcggcactcatgacgattccagtcgggttattgaatgtcggaatcgtgtaaagaatggcatggtgtccctgaatgggggcgttcatctgccagtacgccaagccctgactgtccatcgggatgccagcgagatgggtgtgggccgattgaaagacgtgtaaagatttgacataagtaggtgcttccgtgtagatggtggcatctttgggaaatagtgacattgagaccagttggagcgcttgtaatgatccggaagtaatcagaatgttttccggatgggtatgaatcccaactttttccaagtgacgtgcaatttgttgtcgcaaagccaaaatgcccgcaggctcggtatagttcaaactcgttaactgttcgcctagatgtgcaaaggcccgttgaaaaagtggacggggaaattgttctggtgcgggttcacccgtacttaaacgaataaccgcatcggtttcaaattggttgattttttggagcgcgtgggaattgggcttgaattggcctgctttaacatattgcgaccagttgacgtgttccgccaataagctggaccaatggttaccggaaataaccatcccagagcctggattgctcgtaattaagccgactgccattagttcatcaagtgccgtaattagggtgctacgattcacgccgaattgttcggccagtttacgctgcgcaggaagcttagccccaacggcccaattgcctttagcgatttgttcttgaaaatagttagtaatttgttggtaaattggtgtgctgacctgtttatttggttgccagttgatcgttaaaattgccatggcaaacgcctcctgagtgcccatgcgggcgaattaagctgtcattctactagccagaagtttgatgattgattcaggtggttgggtgaaaattgttaaattggttggctacaaatgaaattatctctattataatcatctctgaattaaaagctagtcggatatgaccaattgattgaacgataattggttggtaaaagaatcgaattggctggtcttaaggaggtcaaaacatgcaagtgtttttacaaggattattatttggaattgtttacattgcaccaatcgggatgcaaaacttatttgtggtttcgacagctattgaacaaccattgcaacgggcattgcgggtggctttaattgtaattgcgttcgatacgtcgctttccctggcttgcttttatggggtgggccgattgttgcagaccactccctggctcgaattaggggtgttgttgattgggagtttattggtcttttacattggctggaatctgttgcggcaaaagaccacggcaatggggaccctcgacgcggacttttcatataaagcagcgattctgaccgctttttcggtagcatggctgaatccgcaagcactgattgatggttccgtgttgctggcggcgtttcgggtgtcaatcccggcggcactgacccatttctttatgttgggggtcatcctagcatccattatttggttcatcggtctgaccagcttgatcagtaagtttaaacatctcatgcaaccacgagtcctactctggatcaatcgaatctgtggtggcatcattattctatacggcgtgaagttgctagcaaccttcatcacgaaaatatagttgcggttacctctgacaatcggtatgctagtcgtattggactttttatgagagggacgatacgcatgaagattgctggtttcggagtggaggcctggttaaacgcacatgagcgtgaagcaaccaccgatattagtcaaagctcaatcgcagccttaacgatggcagaaattgcggctttagaggaccaacaagcaccacaggatttttacgaagaactaggggcggcccggctggattatggctggatcgagggctcaccacgatttaaagaactcgttagtcagttatacgagcaagtgccagcagccaatgttctccaaacaaatggggcgaccggggctaatcatttagcaatctatagtttggtggaacccggcgatcacgtgattgcactgtacccgagttatcagcagctgtatgatattcccaagtcattgggcgctacggttgattattggcatattcatgagtcagcgggctggttgccggatattatggaactgcaacgcttgatccggccggaaacaaagatgattttactcaataatgccatcaatccgactgggagtttactagatcgaacactgttagaacaggtcgtcacattagctcgctcagttggagcttacgttttggccgatgaggtctacgaaccactggatgaaaccccgttcgtctcaattgccgatttatacgagcgtggaattgcggtcaacagtttatccaagacctattcagcgcctggtatccggatcgggtggacggcgacacctagtcaagccattgctgatatttttcggaagtatcgtgattatacgatgatctgtgggggcgttttgaatgaccaactggccgttagaattttagcgcaccgccaacgcgttctggcgcgaaatcgggagctagtcagtcgcaacctcaaaattctgacagagtgggtcgcacaggaaccgcgggtcgaattgattacgccacatggcatttcagtgtcgtgtattaaactaatagtaccgatcgatgatgagacgttctgtcaacaattactgcgggataccggtgttttattagtgcctggttcacgtttcgatattccggggcacgcccgcttaggttactgtacggatacgccgacgttacaacggggtctggatttattagggcaatatttacgccgctttgattagttactagtggactggtaaccgtggttgactcattacttttaaataattatacaaatttgtttaagcacattttcctaatagtggcggaaaatgtgctttttgaagttctgtgcgtagtttgccaagtgaatatttgctataatgtattcattacaagatttggggaggtttcgcgacatgaaaaagtcagagcgccaagcagttatcgaacaattaattagtgaatatccgatcgctacccaggaagaattgatggctaagcttaaagcagagggcattgctgcgacgcaagcgacgatttcgcgcgatatccgagagatgcagatcgttaagacgccggatgagcacggtcagacgcggtacgcgatttttaaaacaactaacaaaaatgaacaggaccggctatttgaaacgctacacgatgtggtgacgagcattgaccgtgttgaattcatgaatattattcatacgctaccgagtaatgggaatctattggcggcgatcattgatgatttgaacttgccagaagtgagtgggaccttggctggtcacgacacgatctttgtcgtgagtccgaatacgacggtggcaaagcagctatacgaatcctttgctagtcacattagtaatgaagactgactgtggtgagcagtctaattggttgcactaagccgtcgttcacggtatgattattgtcatcaaaagaggtgtgagatatgaaatatacgaagaaacgggcgcctcgaaagaatcaaaaacaacgcgatgcgaccttcgataaatttaaacaacaacaaaatgagctcaacgctaaccgccggggtgtccggcgcaagtaatggctgagctagctttcaagtatgtcatatggacggctcggaagctttttttgtttatggccgttttatcgtagtgacctttaatctggttacaacacgtggcctaaatcagtgatttcggcaacaactggcaaacatcgggttatctacaaaatgagttgcgtttgattgttgaagattttttcaaggttgtggtcaattactgagcatcggaaaatttatgatacaattgtaaaagctaacaagtaacgcggacgttgtgacaggtgcgtcggctgaacaaggggaagattatgcaaaaaaatggtttttgggccacgatcaaagacggcttacgagtcattggcaattggttagcaccctattggcagcgattcgctgccgtcgtcggctaccaatggcaccggcgacaaatcacacggtggctaattgtactcgtcttgaccgtcatcttaattgggagtgcctatttaacttatgaagccaagacggctaaagttggtaatttacaggcggagctagaaaagacaactgaaatctatgataaggacaataaaaaggccggttcactctattcacaaaagggaacctatgtccatttgagtagtatttcaaaaaacttacagaacgcggtaatttcgactgaagaccgtaatttctataaagaacatggtttctcagtcaaaggaatcgggcgggcatttgtcctgctcgttatcaataagatacttggccgtgactacattagtggtggtgggagtacgttgacgcaacaattggtcaaaaacgcctacctaacacaacaacagaccttctcacgtaagtttcgggaaatctttttggcgattgaaactgaaaatgtctattctaagggccaaattttagcgatgtatttgaataacgcttatttcggccacggtgtctggggagctgaggatgcgtctgaacgatattttggcgtacacgcgtcagagttgtctgttgaccaggcggcgaccttggccggaatgctgagctcgcccagtggttatgatccaatcaatcatccgaaagcgtctacggctcgtcgaaacgtcgtcttgaataacatggtcgctaataataagctttccaaaagtgagtataagctttattcgcaaaaggcgatgacgctgacgaataactaccattatgaaagtggttataattatccatattatttcgatgcggtgattgatgaagcaattaataagtacgggctaacggaatctgacattatgaatcggggctataagatttatacgtcgcttgatcaagatgatcagacacagatgcaagattcttttaaggatagtacgttgttcccggccaacgcggacgatggtacgaaggtccaaggggcctcaattgcggttgatccgtcgacgggtggtgtgttagccgtagtcggtggtcggggcaaacacgtcttccggggctttaaccgtgcgactcagattaagcggcagccgggttcgacgatcaaaccgttggcagtgtatacaccagcactacaaaatggttatacgtatgattcgaacctttctaataagaagcaaacttttggggccaataaatatgcgcccaaaaactatgataatgtttatagtaaatcggtcccaatgtataccgcgttatcgcaaagtatgaatattccggcggtttggttattgaataagattggtgtgaataaagggtatcaatcggtgaaaaagtttggcttaccagttaccaagtcggatgataacctggcacttgccttaggtggtttgacgacaggggtatcacccgctcaaatgaccagtgcctatacagcgtttgcgaatggtggtaagaaaacgacggcccactttattacgaaaattgtcgatgctagtggcaatgtcgttgtcgataatacgaagactaagacgaagaaaattatgtccgccagcgttgctaaagaaatgaccagtatgatgcttggcacgtacaatagtgggaccggggctgcggccaagccgtatggatactcggttgctggtaagactgggagtacgcaggctgattacagtacgggttcgggaacgaaggatcagtggatgattgcttataccccggacattgtggtcacgacctggatcggatttgatacgacgaacagtactcattatttgaagagtttatctgaaaatcaactttcctcgttattcaagaatgaattacaaaatattttgccgaatacgaataatactagttttggtacgaaggatgctgcgacgctggcaaccgaatctaatagtagtgattcggatagttctgatagtggatcatccgtatgggaaaacgttgagaagggcgctaatgcagttaagaacaaggctaaagactggttctccaaagccaaaagtttccttggcaactagtaaagctagcttctgaacgtactaatgctattcaagttccgttaaaaatgctaaaataatgacgacacatacttcgaggaggaactcacgatggccgtaaatatttacgatactgcgaaccaattggaacaagaattacgtcagactaaagaattcaaggaattaaaggtcgcttatgacacgatgaagaccaatgacagtgccttttcactgtttaaggactttcaagaagttcagatgcaattgtcacaaaagcagatgaatggggaagaattgacggatgacgaagttcaaaaggcccatgatttagctgataaggttggcaacgttgacgaaattaagtccttaatgggtaaagaacgtaacttgaaccaattgatgaatgatttaaatcaaattatcactaaaccagttcaagaattataccagaactaagtaaattaaggatcgaggggcaatgacggaatctgttccgtgattgccccttttttagtgggggttatcatgaaatttctacacgcggcagatttacatttagatacaccgtttcaaggactgagtggcttaacaccagctttgcaggaacggttagtgacggcaccactgagggcactcagccgactagtcgatttggcggtggctgagcaagtcgatttcgtcctgctcgttggtgacttgtttgaccaacagggccaaagtgttcaggcccaggcggcactgatgacggcgctagcgcggttgaatacggctgcgattccggtgctgctatcgttcggtaaccatgattttcaggcggatttaagtcgctggcactttccggccaatgtgcacgtttttggcccgcaggtaacaacggctaccttaacgactgaggcacaagaacgggtcgcgattagtgggtttagctatgcgcagcggtgggtgacgacggaccccgttgatgattatcctgttaaagccacgggcgttgattatcagattggtaccttgcacggtcagattggtgtggcgggtgaccactacgccccgttcaacgttagtgaattattaacgaaacattatgattattgggcacttggtcatattcatcagcggcaaacgctcaattcgcaaccaccaatcgtatatgccggcaacacgcaggggcgccatcgcggtgaaactggggcgaaggggtgcctcattgtgaatagccaggccgatcagaccttgcaaccagtatttcacgccttgactgatattgaatgggcggattggacgccaacgctcactagtccagaacccatgtcccgttcacatatcgtccatcagttagctgatcaattatcattgaagatggttaccggcttaaaattagtaacgattacgttaccagctagtcttcaactgagtgcgatggcggaattagccttaaatcagggggccattctagcccagttgcaggaacaggcaaatgaacattggtggccggttgcgattgagcaagcaacgacggatacgatgaccctcttgtttggtattaacgcgacgacctggcaacaagttggtgagcaggtcgtgaccgatcaagcagtcgctgaacttgcaggcaaactcttggatgaagactttctgaacaccgcgttgctggaagatatgtcacccactgcttggcaacaacaagtggtgcgactcttaaatgatcagtaccatttaacgacgggggtgaatgatgatgcagattaagcgtcttgaaattgcgggctttggcaaatttcaacagcagcagttcgagtttggtgatgggcttcaagtgatttacggcctcaatgaaagtggtaaatcaacaatgcgggcctttattctcggcatgttatttggttttccctcccgccgtcacccacttgaacgccatgaaccacaaggtacgaatcagtacggtggttcgatagagctagtggttgacgagacgacataccggttgacccggttaggtgatcaacccgctaccttggtgaacgtgcagacgcaggccgctcaaccgctggccttacttgacaagtggttagcgccttatgatcgtgaccagtatttgcgattgtttacgtttaaccaggctgaattgacggcgctcaaaactatgcacgccagcgatttgaacgtgcaattacaacaagtcggattggtgggcagtgcaccatggcgagaaacggcgactacgttacggacagatgcggaggcgttatataagccccgcggccgcaaacccaggttgaatcaagcattgcagcactatcgcatgttgacagaacaggtcaaggcggccaagcaacggtacccagaatacgaaacattacaaaatcgattgctggatttgcaggcacaacggacaagtacccaacgtgatttaaccaagttggatcatgaacaacaacagctcgccaatttacgaaatcagtggccggtctatcaacaattgcagcaactgcaagccactaatatgacgacgacactaactacggcgactaggacacgctatcaacaattaagccaacagcgaacggaattgcaacacgccttggcgagtgcacgtcagcaattaagtcagcaaccagttgatacacaatctcaaggactagttggcttctacgtccaacatcaagaccagtttgaccaattagaagctcagttaccaaccctgcaacaaaccttaggccaataccaaacgttgacccagcagggaagtgctgccaaggctgattttcaagcgcaaagtaatgcacatcctgagctgttaggttgcctctctccgcacaaacaggccgcaatcgagaccttgaaggcgacgttggcagcgacggcgaacacgcgtcgccaatatccggccccgaatagtccatcgcttgattggcgcttgattggtggtgcaatcgggattgtcgcgggattattgctaccattaggcggctttaaatggatcttgatgttagcaggtgtggccctacttggttggtttgggatgacccgtagtcagggtaaaccggtgcaagcaaccgaccacttatcagaccaattagtggctgctggtctggcaccgaatctgactgccagtgaagccttacagcaattggaactagtcgcggcactgcaacgcgcacaagctgcggtcacgactgctgatcaagcattagcaacacaggctgccaaactctggcaattgattcagccttatcaatttgcggcaggatggattcctgttgatcaggatcatttaacgacaagtgttactcgaattgcccaattctatgatcaagtccatcaagtgatgcaacagcagaccatgtccggccccgactttgcctttgtccagcggcaggtccagcagttgacgcagcaggtccgtgatctgaccgagcagctacaggcgttagcaacgaccaacggtttagcggatgtagacgcgttgacgcaagcggttagtgatgccgaaaagcaaacggccaacgccacgagtcgtcaacaattacagcaacaactcagttctgctgagctatcggcgttaaagcagtatacgtcgcttgaagcgttgcaagcggtactggctgaaagacagcaacaacgtacccaaacggcgcagcaactgacacagttagctacggacattgccacggcgcaagcacaactccaagagttgacggcggatggccagtacgctacgctacgtcagcaacaggcggatctacaaacggaaatcacagtcatggcacgtcaatggctaacgcggcagttgggtgcgaactggatcgatacggcgctgcaggcattgacacaacagcaattaccaactgttttggccgcagcaaccacgattttcgcgcaattaacggcacagcggtataataagattgacttagacggtgatgaaatggttgtgaagacggcaacaacgcagttcatggtcgcggaactttcaacggcgactaaggaacagttgtacttggctttacggctagcgttgatcaatcatttgggccaagcagctcagctaccactaatgattgatgatggcttggtgaattttgatgagcaacgtaagcaagctgcttggcaagtcttagcagcagttgctcagcatcatcaagtgctctactttacgaatgagacagcggcactgacccaactgaagacagcgactgtacagcagttaacctaggggggataacatggcaaagaagttatttgattatcaattagatgaaaccgtggatggctattttttgttgaaagattcggaagttcgcatcgccaagaacggcaagaagtttttagccattaattttcaggatacttccggcgagatttccgggaagttttgggatgcaagcgatacagatgtcgaaaactttcaggcaggtcggatcgttcatttgaaaggtaaacgcgaaaactatcagggtaatccgcaaatcaaaattcaacaaatgcggctcactcatagtggcgaaccgcaagaagtgcaacaatttgtggaacacgcaccactaaagaccgacacgatggcggacgaaatcaatcagtttgtctttgaaattactgaacctaattggaatcgaattgttcgccacatgttaacgacatttcatgaccggttctttagctatcccgcggcgaagaaaaatcatcacgcgttcgccggtggcttagcctatcacacgttatcaattttgcgcttagctaaggcagttgccgatcagtatccccacgttaaccgggccttactatacgccggtgcgattttgcacgacatgggtaagacgattgaaatgtcggggccggtctcgacgacttatacgttggcagggaacttggtcggtcacattgtcctgatcgatgaacaaatcgtggagacttgtcaacagttgaaaattgacgagcagtcggaatctgttttagtcttgcggcatacgattcttgcgcaccatggtttgttagaatatgggtcacccgttcggccccatattatggaagctgaaatcttacatgacttggacgagttggacgcgtcgattcaaatgatgcagacttcacttggacatgcagagccgggcacgtatacggagcggatctttgctatggatggtcgtaacttttaccggccaactggtgatcaaacgaagggcgaattaccagacgaacaaaactaactaaatcgatacggtgtttgaaagaactgttgaaatcaatgattttaacagtttttttgtgacctttatttttgatgacgaattccattggggtgggtgagacggtgcaccattaattagcgtgggccgtcattaaagataaaataaaaattttaattgcaattaatatcctgacatgataagttactacgagtgattagttgttatcgttgaccattgcatacgtgttgaattagggcatgttgagcagtattggcgtgcacgatgcgcgtaatctagcggccagactgattgattaaacgataatccggcaactgtggcacgtgacgggaccgtcacagagacaaatgatttaaaattgcacgcattaggggagattatcgggatgaacgaacaagaagcatatgtaacgacattttattggctcgcggattgttggttggaaactagctatctgggacttgaggatgaatttgacgacgatgaaatcgatgacgccgtcaagtcactactaaatcggatgcaagccggggcaatttatgaggtaacggcggatgatccaatgtggcaagcatggaagcgggcagttagggccgtgcttacgcccaatgatcatgctgaacatgaagttgatgagaccgacggagaggatgaattagtgctgccagctggggtacgaccagaacgtcaattagaagaagttcaagcctatgcagcgatgaacgcgtttttgcaggcacaagatcaggaatatctgcaagaaattggtaaacgggcggccactcaggtcagtggtgccgggtggcaagtgtggcgtgcacatcgccagagcatgcatccggagtctgccgccccgctgacgttgactgctgagcaattaccagccgtgatgtgggcctttttcgataagtaccaggatactgaggactcttttgagatttttgaattggttagccaacttgaacaatggcaaaaaagtgctgatcgagatttggacgcgcaatggtcacagcttgtggcgaaaagtcagattgatccggccgcaattacgctcatgcagggcttgtcgttagctattgagttctttgatcagcttgagtgggacggtgatttgactgccaaggcaactttgcagaataaattgatgcaacgcacgctcgatgacacgctcaatgatgagacgacagccaactgggcggatgcctggcaacactgggatttagcagatccgttgacaactgaacagtgggcccgacggtttgatccggcggacgactatgaagaagatgaagacgagagtaaagaagatggctcggctcggccagcttggcaacttggtgcgagttatagtaccgttttgattgcaatgcgcttagtcgcttacggtgtactgcggcctgagagtgtgcctggtatggcaactgtgaagatggcgaaccgtgcactggcagctaccgtcagtattggtatcgtgttagttgcttggctggtcacagctattctgattacaattgtaatttggggatggcggtggctgcgtaagctgattttttagtgcagctgaacggccaactgaatcacaatagtgccgattgactaggctgaagtttgtgaatccagtagttgaagctgaaaggacggggcgtcagtggtagtgcttcatgatggttcgtaactcggacagaaagtcggcatctaaatggggcgattgtcctaattgtaatggtgccaatggctgatataacgttggtatgtctggctttaacggctggttattgaagtattgctgaccatggattttgacggtcgctttgagcgttccaatcgtcatgacggccacggcggtatttaaaaagacgccaccattgagactagtatatccagcggaagaacgcccaactaaagtaacgtgcgggttacgttttagcgccatgatggtcacctccgcggcactcgctgtctggttaccaataatggcataaatatgacgaaagtgggccgctgttggttgcgaaaagttaaagtcatcttgaccgagtccaccagtgattcggccatggtacatcatacgtggccggttgcgatgatggttcgtgatgccggtgtagagggtgccgtctggaatgatggcggccaggccagcaatcatcggtgccgaactaccaccagtatttgctgcgaagtttaagattaaatcggttgtcggcttagtttgtttaatcaggtgctggagttgtgtccaatactgtttttgtaattggtgctgactgctgtaaaatgctggcacattgatgatggtgaggccggcactcattgtcttggtcggacgggtggcatgttcgacttggcggagattggcgacggcgaatgaatgtaaatttgcagcgcgcagaatttgattgggttgggtcagtgacgtgattttgcgaccatgatcagtcgcatgtagcatggcttgccattgcgtgcgatggttgataatgccatattttgacatgtaggtgatagccggcatagcgtcgaaggacgcacggagccgattagaagcggaaagaccaaacgttaggactatcgaaattagacctaccagtccgtaacggcatttattcgttatcatgataagccatccttacttttcgtgactagattagcatgtattggttagctaaagtgtaggcgtggcgtcaaaatttcgcaacgaaaagcatatcttaactggtgcgtctttgaaataatggttactgttaaaatacccatctacattggccgtcttaacggctaagcagatgggtatttgttgtatcatgaaattgtgggtctctgtcaaccggtgttgatgaagttatatttagaatccaattcatttacgaattgggttctttttttcgattttgattttgaactcaatttgaattcgataaataaagttttgccagttcttgtaaccatacgcggttcttttgatttgcttgattttacggttcacaccttcgacgggaccatttgataatcggccggtagtcatatttttgatgagttgccggttcttgataaagcttttaatattggtcattagctgaggactgacattttcgacatgacctagtgctgctttgaaggatcgataatcacgcttttgaaaagccttaactaaggcatgtgcggcttggtaggtttgtcgaaactgttggtctagatttaaaccggctacgactaattgctctggtgtcatgcgatctttaagatgcgcaaaccattgaggtttgcgcttttcgaggctgtcataatcttttaaatataaccgccaataatatttaagcactcggtattcacgactcttagggttaaagcgtttcatgagttggacccgagtttgattcaaagatcgtaaggccatttgaacaagatgaaagttatctgcgactagtttggcgtgtggaaagagtgttcgaatcgcgggttgatattgagaattaaagtccatcacaacccgggttacgcggtcacgatgacgtttagaataatgattgagaaagaagtctttaatatcggcattcttacgtcctggtaaaattgtaatgatgtcgtgggtttgggcatccaccgcaataaaactcatttgtttaccagttgaacgaaattcgtcgatacaaagcatcgttggtagtccgttgaaagctggttgggtaccttgtccgagtaactttattcggcgactaatcgtattggtcgagacattgtattgagccgcaatactagccatcgtacggtcttcagttaatgatagatcaatggcatgcagactgttttcagatatttgatgatgttttttaaccagcgtagtcgttgttaaactacttttaccacaatttttacagataaatcgctgcttctttaagttaaggatggtgactcgttcgctaattctaggaattctgatgtgaacggtcttaaagccattcttaaccatggaacgtttgccacaacgtgcgcaaacagtaaccggatacgttagctttgcaagcacttgtaagcttccgttagtagctttttgaacaactaaatcagtaatatttgggtctttaatttggagcagtactttagtagaatggtcctgggacatatctgacactcgctttcaattggttttggtcgacttgattgtagcacaggacgatatgtccttttgttgtacataaaaatagtgttgatggattttatccatcaacactaaatatcatagacccgaaattgttgacgattgtgccagatcggcttctaactgggttaagaagatcgtcaccaagtctttttccacctggttcagtgaatgctcggctggaaaggcaatgaaataattcagggacattaacgcttggggcaaaggtaagatgttatagcgttctggatcaggttgggtatgcacactgtctggtaaaaaggtaatacccagtccagcagtggctagtttggtgatggtggcggtattcgtgctctcaattacgatattcggtgtcacgttgtgcttttgtaataagtagtcaacttggcgtcgaatcgatgacccgtggggagacaagactagaggcgcttgtagcaggtcgttaagggggagcgctcccggattaatgaaggcctgatgtggttggtaccagttgacggtgttcgggataatcgcgtaatacccgtcccgaccgcggtcataactttcaagccccggcgcgatggtttccggattttgaccaattaagaagtccagttcaccgtggagcacgcgctgttcgttgcgactagcgatatcttcggttaattcgatcttagtggccgggtgggctttcaaaaaagcaggtaaaaataggggcaataagtaatagccgaggctagataagacgcccagccgaattacttgctggttggcatgtgtgtattgcctaatttgcttattaaagtaatccttctcgttttcgagcgccgtcaaatattgataataagtccgcccagccgtggtcagtcgcagtggcgtgacttcacgattgatgatggtgacgcccaattctttttcaacattgcggatgctttgggtgaggtaaggttgtgaaatgtagagatctttagccgcccgggtaaaattgccgtgcttgagcaacacatctaaaaaccgtcgcatttcgctagaatctgattttggcataaagcgccttcctctcgcattgtgattaggtgagtattcgtttgattgctgatttggtcatgttgagttagttgcatcgccataaggacgttcaaaacatgttcaataagttctgtcaacatcctggcgatagtggctaaatagcattatgaccaaccattttaacatgattaattttaacgcgaatcgtcgacatagtaaatttgttatcggggtatagataaataaatatttcacaagcagagcgctttcacgtacactaatcagtattaagagtggccaatcattcaatagctactcgtcgaaaacgactgtttaaatcatcctgaaaggatctgaaattatgaaatttgttgggattgttgggacgaatgcaaccaaatcgaccaaccggcagttactgcaatatatgcaacggcattttcagcaacaagccacgattgaaatttgtgaaataaaagatttaccggcttttaatgaaccggaagaccgaacagcaccagtagcaattcaacagctcagtgataagatcaccgcagcagatggcgtgatctttgccacgccggagtatgatcattcaattccggccgtactaaaaagtgcaatcgaatggctgtcatataccacgcggccgttaattaataaaccagttatgattgttggggcctcgaacggctcactgggaacctcacgcgctcaagcgcacttacgccagattttagaggcgccggaattaaaagcactggtgatgccaaatattgaatacttactaggccgttcactacaagcttttgatgatcagggcgacctgacttatccggataaagttcaggaattagacaatgcgtttggcgaattcattgattttgtagatttaacgaataaaatcatgccgtcgagtcagtttttcgaaaagagtaagcagttctcgtggcggcaagtgactggggaggaataaacatgaaatttgttggaattgttggaacgaatgctcagcattcgtacaatcggatgttgctggaatttatgcaacgacattttgcgacacaagccgaaatcgaaattttagaattgactgatgtcccgatgtttgatgaatcgaatgatcaaactgacagtaccatcattcaaaactttgccactaaaattgcgacggctgacggggttatcattgcctcaccggaacacaatcattccgtgccttccgcgttgaaaagcattattgaatggttatcattcaaaattcacccattagatggtcaagcagtaatgattgttggggcttcatacagcgtccaaggatcgtcacgcgcgcaactacacctgcgccagattttagacgctcccggtgttaacgccagtgtcatgcccggttcagaattcttattaggtcgtgcccaaacggcttttgacgatcaaggtaatttaaaggtgcaagggacggttgattttctggacagttgttttgcaaagtttcagaagtttgcgaccatcgtcgccgagatgcgggcaccagaagcgcttagctttgccccgggtacttatcaggtgacggccactggacataatggcgaattgccaatgcgagtgaccctctccgctgaccggattgaaaatattgaaattgataccagtagtgaaacgcaggggattgccgatgtggcttttgaacgcattcccaaggagattattgcgggccaaacgctcgctgttgatgcgatttccggggcttcaattaccagtcatggtgttatcgatggggtcgctcgtgcggtcaaagaagctggtgccaatcctgatgatttgaagaaacggcgtgcgactaagcaggtcgctcaacctgctgtcaaagaagtgacgactgatgtcgtagtggttggtgctggtggggctggtatgacggcagcggccaaagtgttacaggctggtcatcaagccgttgtcctagaaaaattcccagctgtcggtggtaataccgttcgcgctggggggcccatgaatgcggctgatccggattggcaacgacagtttgcagctttgccaggtgaaaagcaaacgttgaaggatctgagtgagcgtgatgaaagtacaattgcacctgaatatcgggctgatttccgtaaattgaaacagcagattgacgcatacctgactgccaataccaatcaaaagggcaccttatttgattcaaccttgttacatcggattcaaacttatttaggtggtcaacggactgatttgaacggtcaagagattcacggtcagtatgatttggtaaaagaattgacggataacgccctggattcagtcaagtggttacaatcgattggtgtgaaatttgatgaaagccaagtgacaatgccagttggagccatctggcggcgcgggcataagccaatgggcgatctagggtttgcttacatcaagactttacgggcctttgttgaacaacagggtggtacgattatgacggaaacgccggtaaaagaattactggtgacggatgggcaagttcgtggcgtcattgcgactaatgcggctcatgagaaagttattgtccatgctgatgcggtgattttagcttctggtggtttcgcagcgaatactaaaatgttacaaaagtacaatacgtactggacggccatcgacgatgatgtcaagacgactaattcacccgcaatgactggtgatggaattcggctagggactagtgttggtgcagcattagttgggatgggcttctcacaaatgatgccggtatctgatccggagaccggcgaattattcagtgggctccaagtgccaccggcaaactttgtgatggtaaaccagcaaggaaaacggttcgtcaatgagtacggcagtcgtgatgagttaactcaggcggccattgataatgggagtctcttctatctaattgccgatgatgaaattaaaaagacggcttacaacacgacacaagctaaaattgaccagcaggtggcgaatgggaccttgttccgtgctgatactttgacagatttagcgcaccaaattggcatggacccggcagccctgaccaagacgattgcggactacaatcgttacgttgatgctggcgaggatcctgaatttcataagacggcctttgatttgaaagttgccgtggcaccattttacgcaacgccgcgtaaaccagcaacccaccacacgatggggggcttgaagattgatccggatgctcacgttttaaatacggacggtcagattatcgacgggctatacgcggcgggagaagtagccggtggaattcacgcgggtaaccggctgggtggtaactcgcttagtgatatctttacgttcggtcgaatcgcggcggctcatgctgttgctgagcacgttgatccggtgacggcctaaggcaattattaagtcgctacgttggttgagtcgtgttagtgtataatcgaccgtagagagaagcagatcgacaagggagattatcacatgcaaaaaccaatgccagtcgcggtgacgaacattgcggacaatattacgcaccaaccagcttatatgacgattgttttaaatgatcacaagtattcgaccgcgcgcaaaaagacgccgtttatcttgaaagcgttgaatgagggcgcggctgctcatgggcgtttgacgatcacgcctagtcggctgagtttggccgatgagcgcggcacagtctttcaaaccttggcgccaatacccacagtcatcacggacgtcgagctgggattgtatcgctcaatcgtgcggcaacttggtaatggcgtacgaatgaaggcccgttacacattggcggtgacgttgaccagcgataccgctacttatcagatgttaaataccgatttgtcagtgttgaaaccgctgttggcttggatcaccgactttcatcttcacttaaccgattcgttacaattggcaaccagtgacatcgactggcccaatttgacggctgatcaatttgaagcattgacaaagggcaccccgtactttgcttggcaacagacgattggggcccactggtaagtaaaattaagaactacaaaatatgaagccagactttcgataatagtcgaaagtctggcttcgttttttattataaaatttcaccgataaagtcgcctttaggtaattgttggaagtcgtaagtttcaaaatcactcacttgtttggtataccagtgtaagctttcggtaatcatcaggttgacggcctcatctttttcctgcaaggcgatgatgggcaagtcgcgcatggtagccacacctagctcgtaggcggtaccagaatctaagtttttggcttcaaagtctaagacagtcacgatgacttgcgcggccgcaatttgggccatgtcacggtggaaaatttcggtcgcccaagttttggtgaactgttcggcttgagcgtcctggtgtagacgtggtgaataaaaatccgtgaccgttggattttttgctaaagcttcctcaagttgtgtgacccgcgtcacttgttcgggactgaaaaacggactagcaatatagatttgcgccatgaagacactccttaaaattaatttgataataaagaccaatgggttcattttagagattttaggcgctaacgtcaaacagtttttaatggatggtctgagtggagacgtgtcatgtcaggttggtaaaaaatacggtgacgttggccattggaaggctaaataagtaacgtgggtagcgattgattaatcatcaacttgtttgtaaatctaccaatgacaacttattaataacactgatgaaaaagatgggcttattataaagtgatcgtagaactattggtaattccaatggatattctaagtatcaaagttggttgtgtttggcagagaatgggggcagttttatgcgaaataaattgttttcagtcctactaggtctgttaacagttttagtgacagtcatagtattaggacggattggacaagcggatgatgtgtcgacggctggcctaacggggaatgaggccagagtgactgatcggtatggcaatgtcatcacagatacaagtcaattaagcaaatgggaggattttacagtcgagtatgactgggctattcgcaatggtcaaccaattgcggccggtgatacagaattgccgaatgggacggttgcacccgttgatttggggtttccattgaaagacgataatggtcgagttgctggtcattttaaaattaaagcgggtgaaaccgctggactgattactttcaacgatgccttatcacaaatggggacgaatcgcgcgagtaccctccagttttacgtgaaaggcacggctgattctgatgtatattttgattggaagctatgatgagcatggcctgcctgcaactttaacatggaatattgcattcaatccaagcggtaagaagcttggaacagttgttgtcaatgacacattgggttccaatcaaagttacctctccgattcagtaattgcgcaaacgggcgcctacaacgatgccggtaattttgtgcagtcgggacgattgtgccacaaggaggctgtgacataactagcctctgtataagcaaatgggacgagaaaccgaattttggtttctcgtcccatttgcttacgcctttgatttttaaagttggtccctaccgtgaccagtttcataatgtttaacgccagtattacgattccggcttccttggtgaccttgtcgaaacctcgcaccgagaatcgattgaaatgtaaagaagccttcatcttgccaaaaactggctcaacatcgatcttacgttgagcgtaaatctgaccagtttctggagctgaaagtaattctcgttgtttcgatttgaaatattcccaattttcgttcacggaaatccttttaagatatccttttggtgttagtgccgcggcaattagttgatgattttcatcatacttttcggcaatgtattctttaaagtcacgggtaaaaccatacttatcagtccgtcgacgataagcattaaaattaaaccggacgttttgcggattgataaaataatcatctttttcatgatagtcccagttcataaccttacggtcatcactttgccattttcgactattctctttaagcattgtgccgtagggaatcaaaacggtatgctgaccgaattcatcttccaagtaccgataattactttcggaaccgtatccggcatcggtaacgatggtgtgacctaacacattgttggcctttaaatgttcaataaacggttgtaaggttcgtgtgtcggttggattttggaaaagccgatatcccgtaatgaactgattactcgtggcgatttgaacgttgtaggcaggttttaattgaccgttttgcatcggatcttccttgacccgcataaaggtggcatcgtgatccgtcttagagtagctgttacgctgaccatagattgcttgctgtgcttggtgttcacgcattttatcacgtcgtttatccaacttacgtttttgtgatttaacagtccggcgttgctgtttggctgggttcggggaaacctgcttagttgcttccacggtttcattaaggaccactaagtgatcctcaaccttgctaatcatgatatccaatagttcgggagtcagctctgatcctgccggaatttcaccgacaattttagcttcatgaagctcgcctaacaggtcaacgagtttttcgcgattcatcttgtcaaatcgtatcgtattcttcttccaaacaaagctatacttgttggcgtcggctaggatcttagttccatcaataaatgaaacatcatcaatcatgccattttgacgaagatattgggttagctgtgataagctatcggttgtcaaagtggccagttcatcagaaattctaaagcgacaaatcgtccggtaggacggaatttggtcggcaattaaccacccagctggcttgttttcacgggcaaaccgttcaattttacgactgctgaaaatgccatagctgtacgctaaaaggaccagttttaacatggcaccgaggttatattcccgcggacggccaaactggtaatcatattttagttttaaactctcaacaagctggttgatgtaacgagcagaatgatgatcttctggttggtaatccaaggcaatactcaaagtggtttgattcatgttataataatcttgcatattaggaatgtcctttcgaggataatttcgtagagtatcgggtgcgaccgatgctctttttttattttctattatatcaaaagcaggtctggaaaaatccgaagatttttccagacctgctttgtttctagagacttatgtcacagcctcttcacttttagcaatgttacgactgccgttaacatagtttataacagcaagttgacgaaggtttcgggaagtagtaataactggaataatttcgcatctatgaatggcacgaccgttagtggcaatgttagttatggtggtaatgggactggtaacggtgataatcaacttggcagcgtaaccttggtcaaacgcgatgctacgattaagtgtgagttgagtgaggctgaatatcagttacaggatcagcatggtgaagtgattcaatctggattgacgactaatgaagagggtgccattaatgtggctggcttagttccgggacattatcggtttgtcgaaaccaaagcaccattgggctacgctttgaacccaacaccaatcaacttcacagttgatgtcgatacaattgcgacaccagttgaagttgcccaatttgatgaaaaggtggcggtcactggggcagttgtgctgactaaaaccgatgctagcaatggccgagcgctggctgggggcaacttatcggctgattgacgctaccgggctgacgattcagcaggggctggtcaccaatgctctgggtcaaatccgtgtggataagctaatccctggccgatatcaatttgttgaaactaaggctccagcgagttatgacttaaatcaaacgccgctagacttcacaattgtgaatggtcagacggcggtagtgacagtaacggcgactgatcgataggcgcagccgaccgaaccggagcagccgggaacaactgaaccgaaacagcgggggatgccagtccctggtacaccgtcagcaaatacgactcagatcacgcaaatgatggcttgggctattcatgaaatcatggctccaggcacacaaaccggtaccacggcaaggtatgcgttaggcgaatccacagcgccgaatgcccaaacttcgaaggcggcaacgttaccgcaaacgaatgaaggccagcagcacttaatgatgatcgtgttagggctcattttatttttagccgttgtgtgggtgccgtttcgttaattggctatttgaaataagtactgactaagattgagattagcatcaaaataggcttccagaaattctggaaatccatctttgaagtgcgcccggcatgggtgataactaggcggtgtaagtccgctgtgggccgtagtagtcggaaccacgagttgagggcaagggcgttcgccgtgagacggagtctgaaggaagcctaagacaaaataccgaaccgatgtacaagaagtggctacaaggctgattagactggatgaagttgcttcacaaactgaagtcctacactacttgaagtcgaagttagtaaagccaacggttgcatggtatgaaagctatcattcttacccggggaggcctgtcggataagctcccaacaaggacgccgatatgggtttacaggagtaaactagtcagccgaggtcatagtaatctgccgtatggcagatgaaggactgaacaataataattctcaccgatactggaggtgttggtagtgcgaagattgcagaaaacagaacaagctgaccgccaagggatgaatagtctggaagacaaagagtatcttggggcgcatagtactactaacggtgaaagtacggcgcaggatggcattcaatttgtagaccgggtccttccttgcaagtagtaatctgaacctagcgtttaagcgtgttcggaggaataagggcgtagctggaattgacggcatgaccgttgaccaactggccgaatatatttacaagaaccgggaagaactcctagagagtttacgtaatggaatatatcggccgcaaccagtcagacgggtagagataccaaaacccgatggctcaaccagaaaactgggagtgcctacagttgttgatcgtatgatccaacaagctgtggtacaggtgctttcgccgatatacgaacaagtattttccgacaatagctatggattccgaccaggtcggagtgcgcatgacgcgattcaaagtgtcaccgaactctgcaatcaaggcatactttgatacggttaaccacgacttactaatgaacttcatcaaacaacgagtaactgatccatggctactccacctaattcggcgcttcctaacaagcggggtcatgaatggcgagctttttcgaaagacgacgaagggaataccacaaggtgggaacctgtcgccgctactggccaatatttatctcaacgagttggacaagctattgacccagcggggccaccaatttgtgcgctatgccgatgactgtaatatttatgtcagaagtaagcgagcgggagaacgagtcttacacaatgtcacaatctttcttgaaattaagttgtaactaacaattaaccgtcataaaacgacggttggcccaccactccgactaaagtttctaggatttacgctcggtgtagaccgtaatggggcatatgcatgaccgcacaaggtcgtgaaacagcgaatcaaacaagcccttaagataatgactgggcgaagtagcggaattagttggttaatgttgatgaaggaaattaaacagaaaatgcgaggatggctacagtactatgggattggcaagatgaagacgtttattcaacaactggaccaatggttgcgaagtaggattagacagttgatatggaaacggtggaagaaaatcaaaacccgatatcgtgagctaattaagctaggaatgacaccggaacaggccaagactaatgccaatacccgcaaggaatattggaaaactgcccatagtaaaacactaacctatacgtatacaaatcaaaagctggagcgtcttggactaataaacctgtccaagacactccagcaaatacacagagtgcttaaattattgaaccgccgtatacggaaccgtacgtacggtggtgtgagaggtcggtaattgaaataatcaattacctcctactcgattcttgaatttaattgtaacgaccaaactagttcaatgtgactagttcaacgacatgaacaaaatcctcccaacactagtgtcactgagcaatagtgcgatagacataacccaaccttgccccggcacactttttaattggctggtattcaaagaagttccagcgtttatagcgttctgtcgagttaatcttgacgtggttgaataattgtgagtaacccccccatgactagaacaattgccaacgtgactaataggtacgataaactgattttggcaatgcctaggccggtcagagccagaccagccgtaatcaggcagttgatcgtgatggcaatgattacggaattgctggggcgttgttgccaaaatggtttggtagtgcgtgtcattagaatcgtgagcatcgcactaaagattagataacaatatagtacggtgctaatttgacctggcgtcaatcctcgatgaagtgcttcgtataaaacacccattccaagggtcgtccatccaatcgctaaaacaccagcaattttactcaaacggcgtaggtcccagcgctcaggatggtacgtaatgtgagtgcggtcggtccctaagacgagggtgacacagtcgtttaagatagctaccagaatcatggcattcagacttaacggaatcagttgccaaatcaagaagcccaatgtgagtagcatggttaattcggctgttcgtgacaacttggtaattgtccaagtcatcatgcgttggtaaacacgatgaccgctatcaagaatctgaatgattggtgtcaatccgggtttcagcaagacgagtttggcagaacgcttggcgagatctacggcattttgaacggcgatgcccacgtcagcctgttttaaagctggggcatcgttgacaccatcgccggtcatgcccacgacgtaacctaacttttgaaaacgctgaacaatcgctaatttatgttctggaataacttctgtaattccagccaattgttgggggtccgtatcggccgtcaatgtgttgaatggcatgacattaccggttaggcccacttgctgtgcgaccgttgccgctgtcttctggttatccccagtcaacataatgactttgacaccgcgatcagtaatctttttgattgcttgcagactgtctggccgtggctggtcttcaacgatgaataaagcgactaacttatcgttgactagtaatgcaacggtacgaccgcggctaaagtcaatttggttcgtcaattttgaagcatcttgatcaagctgatacaggcgttggtaagcgcctagcttgatattaatgggctgatcggccagcaccgttccttcagaataaccacgctgtgaattaaaaggctcgaagtgtgcgggcacttgtacattcacagcttgctgacgggcatagttgagaatggcagcgtcaatgacacttgcattttgttgattagtagcactagtagcccagcagattagttcgcggtcagaatattgggaaaagttatgcattgcgacgaccgttggctgattggcagtaatcgttccggttttgtcgatcagtagcaaattcagattggccgcagcttggataccagataaatcactgactaagatgtgtgtttgacctaactgtttggcctccactgagttggccactgcaaagctggaaggcattgcgatcggaattgtcgcgataaacagcatcgccagaaatggcaacattgtaatcaagttagcaccacgtattattgcggtgagaaccaagacaatcgccagcacggtgtccaaaatggccagataaccaataattttgctgagtagcttttgaagctgaccgggtgcggatgactggttgatcaaactaattgttttgccagaccgactatgctttcccgtactaacgacgactgctaatccgtgcccactcttgatttcagtgccagcatatactagttccccagcttgatgacgaattgcacgtgattcaccactgatactactttcatcgacttctagtgtgccatctaacaattgaacatccgcgggtagtagatcgccattgttcaaactaataacatcgttagggacgatttgggttgctgaaacgtgttgccagtgattatttcgtttgacagcaaccgttaaggtcaattgattcgttaatgttttaagaactttgtcagagcgccatgcttgaatagcgcccgtgacagcagcaaataggagcatcaaaacaataaaaccagcttgaatcgttttacccaacaggatttcaacgagtagggcagcttcaagaatccacgcggatggttcccatagccgagtaataacggcgtgacgaaagctaaactggcgttgaggaaccacgttgggcccgtatttctgcaaacgttcttgtacttcagttgttgtgagccccattagtatgtttgtgggtgcttgcatgataatcacctctgtttggttgctccgtcaattgcgattttagaggtcgtgatcgacgtcatctggaaaatgcgctaaccgggtgccttctgtaccaagtgcttcttcgattcgtaacagttgattgtacttttcaacacgttctgaacgagcaggggccccagatttgagttgtgcggtgcgggttgcaacagtaaaatcagcgaggaaggtatcaccagtctctccagaacgatgggacatcattgttgcgtagccatttttgcgtgctaagcgaattgctgtcagggtttcagtgaccgttccaatttgatttaatttaatcagaaatgtgttggccatccccatcttgatagctttggcgaagagtgtagggttggtgcagacgttatcgtctgtcacgatttgaacccgatcaccatatttttgggtgaacttaacaaagttttcccagtcatcttcactgtaaggatcttcgatagaaataatctcgggaaattggctcaataaggtggcataataatcacttaatgcttctggtgagaggtgccgaccttcaaaatcgtattgcttagtttgggtattgtagaagtaagaagcagcggcgtcaaaagcaatcgcaatttccttgccgggaacgtagccggcctgtacaattgcgttatgcaacatctgtagtgcggcctcggagttatctaagtcgggtgcgaacccaccttcgtcgcctaagccagttgtatagcctgctttttcaatgaccttttttaacgtatgataagtattcacgatcttctcaaatccgtcccgaaaactggtgcgatctacggcagtaatcatgaactcttgaatgtcgatgccgttatcggcatgttcacctccgttgatgacattatggaatgtttgtggtaattctaagtcagtgccaccgaggtagcggtacaacggttgatgtgtctcagcagccgctgctcggcaagttgccatggaaaccccaagaattgcgttggcccctaaacggcctttgttaggagtcccgtctaaatcaatcatgatttgatcaactttagcttgattgaacggactgacgccatgtaacgcgccattaatttctgtgttgacattattgacagccttggaagttcctttgccttgcagccgttgaccaccatcgcgtaattcaaccgcttcgttagtaccagttgaggcaccagaaggtacttcagcacgtcctaacgttccatcggataaaataacgtcggcttcaaccgttggattacctcgtgaatcaaaaacctcgcgtgctttaacaacatcaattacaactgacattttgaaaacccctttcaaattttacgaccaagttgataaaaaaagacgtctactttcaaaggccccgctaaggtccgattgaaagtagacgtcatcaaattgatagtcaattagttacggcgaacgtcatcaccatttatttttaacggttacagcataccgcgcttgaaaaataaacacaagcgtttttcaaccataagtttaaaacccttgataattcgcagatgcgaaatgttaatcaagttaagcaacggcactagttgtataaaaatggcgagcagcggtgcctttgcttgcaatataatcatctaaattaaaaactacctgttcaaataataatgatgattgtaataccgctgtttgttagacaatatagctggtctcgtctttgaagcgtcacggttgactaggaaagaaattcaacgtataaccgattttttctacaaccaacatccaatctcggaaacctcgtcatgccagtgcttggactggctcatagtatctgctggtaatgggcctggttgaaaacaatttgcgtgatgtttagttaattaaatttttaataaaagcaaagtggttaacgaaggtcagtgcgcgtgctatactgaaatcattctagcggtgatggtgttcaccgaacaagcagtaatgctaatgacgacacctacttggatttaagtctaagtaggtgtcgccattttttattgattagaattagtgaaaagagttgagtcataatgccgatgagtctgttatttttagggcaaccaccagtcgctcgtcccgctactgcaagttgtttccaagatctaaatttgaatttgattttcgaacaaattcagcaggactgtccggtaccaatcaaagacattttttatcaaccattaacgacaattgaagcggtgcagcgtcgtcaggctatttttagagatttgttgcgaccagcggggtatcaattaatggcacattttgtgacggctgccgcagaaacggccgccaaaatcaagcaggctcaccatgattggacggctgatcaacaggccgccgatctgttaacggcattatatgagcaacatgagcaacttgaaaagcttacagaggcgttagcacattttcagccccaaagtttaggactacaaaagttacaggctgacctcgatacttatttgcaggcgcctgcgacacagcagttgctgacaatgatgcgcacattaacgagcgcattagtacaagttcagttttatttaacaatcaatgggcggtatgtccgtgtgacgactaatcagttggctgcgtcaaatagtgctgaggttgccacgaagttgtttggacccatcatgacagatctaagcgagttataccgtcccaatgccagtattaagactgccgaagcagttaatggggatactagtctgcaagcaaatattgttgttcaactccataagttgtatccagcagtatttgcacaattaacgacattttaccaacaatatcagcagtataccgttccaggttatgaacaagtcgtgactgagttgaattggtatttagcggtgcaacgttatacgcagcgccttgcccggatgaaccagcttaactttgtgcttccgacccttgttgaattaggagcaccagagcggattgaagcaggatttgatctggagttggcttatgttcaggctggcaaacaaacagcagtcgtgcccaatgactatgtcttgaatccaaatgagcagtttctaattgtggccggacccaatcaaggtggtaagacaacgtatattcgaatgattggtcaggcctattatttagcagccctcggaatgcccatccctggctcacgggcaacattacacctagcaagtcatgttctgacacatttcgagcgtcaagaaaaggcaacccagttgacgggactgctccagcacgatattgaacgattggccgcgctctatcaaacggtcgatgagcatagtattgttttgatgaatgagctattctcttcaacaacaacggttgatgccgaaaagttgggtcaattagtgttaacacatttgacagcaaagcaggcccatggtgtctacgtcacatttttagaaagtcttgctaagcttccacatatggtaccgatgcaggctcaaattattgctggtacgacgatccgcgcttataaaatatatcgttgttcggagacggttgggacatatgcgactagtttattaaacaagtatcaactgacaactaaggcaattgaaaggcggttaaagcatgcaagtcaatctaatcacgcttgaaaaacagcagtatcttgacgaatggtcgttaacaactagtcaaaaagccgtgatggctgatttagaattacaaccaattgttgatattatggcagcggatgatcacgttatcgcaaaaattgcgaccagattattttttacaccattaacaactagccgggcgttgacttggcgtcaagcaacggttaaacatgccctgatgcacccggactattacgaatggttgtatcagtttacaacgacaaccattgaaacggtccggcaaaatttttgggagcttggtcacgagtcggctagttatcatctatacaacaaaagtcgtctattaacgcaatatttgcaggcaattggcacgatattggacaaaccattacctgaccatccggcgccagcacttcaacagtggtatcaatcgctagatacactgttcaacggtcaactagagccgatgaaaacatttttgcgacaggtattatttgatcatggttatgttttaccagcgcacttggccaccaatctggatacaacagttgatgaggtgattgatgtcgtaccaccacatcggtttcaaaaggtgtttactaagttaaagatacatgcgcagggatttgaaattgcagaacgggatgatcatagtgctaaagcacttgaacactacaagaatcaagcagtgatgaaattagccaccattttagtgaatgtttatcaggaagtcgtcaattggttccaagagttgcgattggaaacaggttggttagtgggtgtaattcaattaagccgacgactaccagcggcaccacggtgctatgcgacgttggcgtcatcaatggaagcacaacagttgattaatcccttgatttctttattgctcaaccaaccagcagttgcaaacgacttcttgccagttcaaacggcattgaccgttatcacgggagcaaatcaaggtggtaaaaccacttttttacgcgccgtggggcttggggaattaatggctcaggcggggatgtttgtcatggcaacttgttaccagacaccgccctttgagatggtgttgacacattttaaacgtgaggaagaccaaggtgaacggcacggtaagctggatgacgaattacagcgaatggatcaacttatccacgttatgagtacgtctagcttggtattaatgaacgagtcgtttgcatcaactaatgagcatgcggggtcgcaaatcaattttcaaattacccacggcttactggaagccggagtgactgtcattgcggtgtcccatcaatttgaatatacacaacttgttcaacgctatcattgccggccatactttctagtggcgcaacggcaagcgaatggcaatcgtagctatcatatgttgcctgctgcgcctaaggccactagttatggccttgatatttatcatcggctgattcgatgataacggcttataaaataattactggattttaatcgtaatgaaagtggtaaaaaattgaacattaaattagaaatggcagttctggacagtactggggacgaaagcgccgtgaagttggtgcgtcaggttttgtagttattgagcataatcgtgagatgctagcggtcggctaagttcggctaatttgttaatgatcagcgttgaaactgttgctttgtttgaattgtgcgtaagatattggtactatcaatttgacccggtaagtggcgcgattactgacaattatttatgtcaatggccgcattccttggcccaaaataattatattgatattgccaattattatggttgtaagccactcttttcgagggtcgtgatggtgagaaaaacaattgtcgtgtgtgtctatctgtgggggcatatggacacgttattgatgatttgagatgttagccgagcttttttcagtggatggcgcattcagactactagtagcacaagaagtcttgttgttactgaaaggtaccaattataattgttatttcgtaaaactatttgagtcatattgggggaattagcatgcaaaatccacggttaaccattattgtgccttgctacaatgaagaagcggtgttacctaagtctgcacacatcttggatggtatcttgacggatctgatccaacacaaacaggtcaatgcggcaagtaagttattatttgttgacgatggtagtcaagataagacttggaaactgattaagtcgttggaaaaacagtactcaaccgtgacgggtcttaagtttagtcgtaattttggtcatcaaaacgcgttgatggctgggatgcaggtcgccagtccgactgctgagatagtcattacgattgatgctgatttgcaagatgatccacaggtaatcccagaaatggtggcgcgctatcgtgctggtagcgatatcgtattaggtgtccgcaatgatcgaagtagtgattcacttttcaaacgatggaccgcggacggtttttatcggctaatggagcgtattggtgtgcaattagtacctaatcacgccgatttccgattgctaagtcaacgggcagttcaggcactgttaacctatgaggaaaccaatttattcttgcgtggaatcgtaccacgactaggttttccaacaactaaactttattatcatcgccaaccacgttttgcgagtgtttcaaagtatccattacgtaagatggtggcttttgcttttgatgggatcacgtcattttcaatcgcaccgattaaagtaattttattgtttggcatggtgattagtggcggtagtttgatgatgatgctatatgcgttaatacaaggattactagggaccgcaacgagtggctggtcctcactcatgacaagtctatggtttttaggtgggatgcaattgataggtattagtattgttggcgagtatgtaggaaaaatttttgcggaagtcaagcaccggccccgctatattattgaaacggatgattatacggcaactcaacagccagctattgtgaattcgcaacgggtgcacggatgaaggccgtggttaagagcgtcaattggctggcggccgcggtattggtcgtcgcagtcggcatggcgtggttgcaaccgattcacttcttcggcaacccggactgggcgtcaccgatcgttcaattagccatggttctgggattattggtcatgacgatggctggccggcaggtgctcaaacagttatcatctcgtcagtatcgttggctgttgattgggctggtcggcttaatcgccatcgtgcaaatgttgattgccactagttttgttgacgtggcgcgggccgacccgtttttcgttcggcagcaggcactgttattagcgcggggcagccatcattggcaacattattttatgatttatcccaataatgtgaattttacgttattagttgcgaatctgctcaagccattattgaaactgacgcagacgccctgggtattattaaatgtcatccgatttatctggatcgataccggactaatcagtgggttatatttactaaaccgttggcgttactggcaaccgggggcggtctcatttagtttgttgtggctcgtcagtgttcccgtggccgcatttggactatttgcatatacggacgccctcgttttgccactagttccagacagcttggccttgctcacactcggactaagtttaaccggctggcgtcgttggggcgttttgattggtgatgggttattggtggccgtgggcgtggtgatgaagactaatctaattgtgctctggctcactctcgtattgatggggatcatcttgtggtggcaacgacaattcagtggtcggcaaatgttaggctggctcgtcagtttagtgatgacactcggggtgatgtttgcggtgatgcggactgcccaacagcaagcgggttatacgcgccaagctgatgccgccttaccggcaaccagctggattgcgatgagcttgaacccccaaagctcgggtgagtaccgacatgacgattttgcgcgcgttaatcagatgcaaactgtggcggccaagcgccaacagacccagcaaatgattcagcagcggttacatcagatgggcgttacggggaccctcgtacatttactcaaaaagatgcgggtcttctgggcgactggcgattttgatagctttaagttgaccacccagtggattcgtgcgccccgctggtatttgaatcatcaacgccagcttcaattttggctggttctaatgacgcaaacaatctacctgacgatgctggtgcaagcaatcgtgactttgatgaggcggcgcgagtgggccgtgacgttcgttgccctggcaattctcggtttaacggtttttcatgtcggactttgggaagtagaagggcgctatgcgttgccactattaccgggattgatgctcctcagtattgtgggtggtcgtgagttgccggtgtggcaccttaatcgagtaatacggcgccaactgacgtggttggtcgttgtactggcggcaatcagtgtggtcagtttgtggcagacgagtcaggcgatgcggattactgatgtggtacgtggcaatcagggcaatgggcgttatgttgtgtccacggttcaaaaaattagaccgggtcacgctgttacgtcgccgctagccgttagtggtaagagtaatgttttacggttgaagccagttgcgacgcatgagcgcgtaacaattaccttgactaggggggcgcatgtcgtcaaacggtggcggggctcggccaatgagttgaccactttgaattatccgttgacagcggcgggcaacctgcgattagcgattaaaaatactggtcagacgcccgtccggtatggtgtgatggcggccaactacagtccgttaacaggccgggtgacggctaagcagcacgcatacttacaagtcgtgataaaacagcagtttattaagccgcacgcgttaacgacgggtgccgccagtctagcagttgtcggctgtgtggcgctggcgaccattttatcgttaggtcggttacggccagaaactgaataataaaacttgaatcgaaagtcttaataactggtgttgccagtgttgggacttttgtttgtggttaaacgaaatataatagccgttaatttgggtgacttatcaaggtgaggtgaattcaaatggttcaaattattgcgcatactttagtgactgccgggcacgacattttaattttaaaacgcaatcaggttgagcatgggcggccgaatgttgatgccagctattgggatctgcccggtgggtgtgcattagctaatgaattaccgcaagtagcggccaaacgcgaatgttgggaagagactgggctgaaagttcaaactgagcgcgttatttgggaagattccacctttgacaaggctaaaaatcaggtgtacacgcgtttagtgtatagcgcacaggcattcgttactagaccgacagtcaacttagatcttactgaacatatggcctttctttggatgaaacctgaattgattttgactaatataagaattgtgccctatctaaaaccaatattaacgcgactggtctagcagttaccgcgaccattaaaacaacaatcggactgcctagcagaatagcttggcagtccgattgttttgattgacacgattctaatggtggcgatatcgttgacgccaaaggatgaagctaaatccacttatgattgagatcagtagtccacccagcaatcccgggacgtggtaagttagctggatctgattcttaccggactgaatcggcagggctaacatcccgccaatgaccgttttaggagtaactttgacgccgttgaccgttgcgcgccaccccttatcggctggaatagcaacgtagagccatttttgtttggagcgattggtgacttgaccactgaccacggtatgaatgcccgagacgtggtaagtcggtgtaaagcgcgtggatagcagttgctgtttgacttggttgaaccgggcttgatccaggctggcgatgtggacatgggtgccaagcgttggttgggtacgtttgaccgttaacgtgatgacagcgcctttgtcaaaataacctagcgatcggagcactaactcaccgttggcattgaacttagtcgggactaagtgaccgttgacccgcatcgtggtgtactttgtttgacgagtcgtgtcgttataatacagcgtcccggtgcgtgtcatccttaatttaactgtatgcaaatacggatagcgtttggcctgtgaatcttggacgacgtgatctgagagcgtcgtggcattgccaaaataggcgcgtttcgatggccgcaaactttgtaagaggcgttcttgattgataatggcactattctgacgaagctttaactgtctaaatgctattggcacggcaaaccctaacccgttttgactacggagccgcgttgtcgcttgacccacggcgtttaattgcacagcgtattttacatctaagagtaaatcagtgaccggatttaggccttctgaactgacacgccgggcgtttttagaaaatagcccaagtgacttcaacatgagacgtgtttggttcgcaaaagttgaactgtagtaggtaatatcgtgaaagttaaataacatcgggtcgttgtaattacgatacttgctatcataattgtaggcctgattgattagcgtattttgattttcaacgcgatataattgaccatcaggatcgttgacggcttgcatttggcggtattcggttcgataggcagttacaaatttagcctgattccctagtggtgacttcgccatcatgagggtactgttagtccctaattctaaggcgacgatacctgccaagctgagcgtttgccaccgcttcgccgttgcgaataaggcaattgcggttaagatgacagcgactaagctgagcgccagcgttgaagttgttaaggggtgcttagcagttcgttgggcaaaccagcctaatatcagcgcactgaccatgagtgtcggtaacaaccattgccagcgcaaggcgatccgccgggggcctgctaaccaggcttcaaaagcgatcatgatcaagacaaagctaaagaaaaaagcattgcggtatggaaagccagcgggcgtttgaaacatgtgccaaatcgtatctaaggtacgaatgttcatactcaagaagagtgcaagtaatagtccgaagctatgccatttgtgagctttagtcaagttgggctgcacccagaaacttagggccagcaagacgaccagactactgctgaagacggttggtgcgtgtacgagccgagtcgtaaaattggcggcacctaagccaaattgactcaaaacagctaaaccgaattgtgggaccggtaagtagctcgataatttgaccgcagatttagccgtggtcagcatgcctaaaccagtggggatcaggacaaacatcgtgcttaacccactgagtagcatggtgaccacgacgtgccgaattaacgaaaattgatgacgaacagtttgccaaagactgtcctgagggcgtttgcgttcaaatagttgataaataaaatagtgaatcacaaataggcaagtcatatagcctaagtagtaattggtgacgatactgacccataaccagccgaaaaagcgcccgggatgactagttgcaattaagtggtcgagtccttgaatgaccagtggtaaccaaattaatgtatccaaccacatgatcgtaaaatagttgagggcaacgaagccagagaggctgaaagcaacaccaaaaatggcagtcgaccaccgctttgtttgaaaatgcgtttgtaaaaaagccgtcatagtgaccgcaatcaagctgatttttaacatgatgagtagactaagtccggttggcaaattggccgccggaaacaacaacatcaaaatgttaaatgggcttaatagatagtaagcaatcgtgggtagtgcgttaccgcctaatgactgtgaaaatgaatataattgaaaactatgcgttaaaatggcatgccgatacgcggtgaaaaatgataagtattggccacccatatcactaattaataagttatggttaccgaagggcgtgatcccccaaattgcgaagacaatccccatgatagcaagggacagtaatccagctgtcactgccacttgccagcggcttgtttgataattaggccacattttattcaactccgatattatgaatgatttcattgtaccgtactgaaacttgaaaactagttaagaaaagcgaacaattttctgaaaaaagttaagaattagtgttagtcattatcatttttataaagtttgctagcagtttaacacagcagttcacgaggttaaactaaaaggggtgattgacaattgattaagaaagtgtttttataaaaggtgaaaactgaatacgatttcttcggggcagggtgcaattcccgaccgacggtaacaacgtaagttgaagtccgtgacccgcgtgagcggtggacccagtgcaagtctgggaccgacagtatagtctggatgggagaagaaaattattgcttgaattttactaggcagtagtggctattggcaacctttaagtaggtttatttagctggatcctactggtgaaatctatttggcgaacacttcacacccgattatcgatgatttgataattgggtgtttttttatcttgttggaggtgaaccaatgttaactgattttatgcaaatggctatcgatcaagccaaattggcgggggtggcgacgtaccaaaatccccaggtcggtgcggtattagtcaaagacggccacgtgttagctcaaggttatcatcattattttggcggtgaccatgctgaggtggatgtgctgcggcaggtcacaccagaacaggcgcgtggggccacgttatttgtcacactggaaccttgttcacactatgggaagacgccgccgtgtagtgcgcgaatcgtcgcggctggaattcggcaagtcgtgattggtcaattagatccccatccaatcgtgggtggtaagggacgtcagtatcttttgaaccacggagttgatgtggtgacgggctgtttaacggacaaagttcgcgcgttgaacccccactacaatcatttttatgtgcagcagcgaccatggatcaccctaaaaacggcgataacgcttgatggcaaaattaatactgaaacgccgactcggacgctggtttccaatcatgctagttatatcgatagtcagtgcttacggtcacagtttcaagcgattctgattggtgaacggacgctaacgattgatgatccacaattaaccgtccgactgacggcaatggtgcagccaccggttcgattggtggtgttgaatacgagtaccgtggcgttaaaccaccggcttgttcaggacggtcaggcaccaacctggttactttgtcgtcaggctgcggctagtgacgaccaacttcgaaacagtcccaatgtacacgtcctgattggcaactggacacccgctgcaatcagtcaactatgtgtcgaacaaggctggcagtcactcttagttgaaggtggggctcatctgcaagctgaatttgttgcggctgaattgattgacgaatgggttagctacatcgcaccaatgatgattggtgggacgggtttgccagccgttaccggggccgctgcgatgacaccgttgacatttgaacaaccaacggtaacttgtttagggacgaatatccggctacgggccgttcgaaaggaagttaagtaaatgttttctggaattattcaaaccaagggccgtgtcagccaagtgcaccaacaagggttggaaatgacccttacgattaccgcaccgtcgctgatgacaccgagtcttaagattggtgacagtatagcggtgaacggcatttgtttaacggtaacgacccgacaagcggatgctttcagtgtagtggtgatgcctgaaacggtgcgtcgaacgaacttaaagatccttgtggtcagttcattggtgaacctagaacgtgcgttacaagtgaacgcgcacttagatgggcacattgttcaggggcacatcgattactgtggtcaagtgatgcagcgacaatctgatgcgcacgcgttgcgtctgttgatcagtttaccgtcagaatatcgcgcactagtagtcactaaaggctcggtggcagttgatggggttagtttgacggtcgtagcggtcacggagacaacgtttgaagtcgatttaattccgcattcacaagcggtgacgaccttgtctaagttacaagttggaacgctggtgaatgtagaaacggatattctgggcaagtacttggcccggcaattagcattagaggggagtcattaagatggatacaatgaaaaaggtagcagcggccttggccgcattaaaacggggcgaattgattattgttgcggatgatgagacgcgtgaagcggaaggagacatggttggcctagccgctaaagcaaccactgcgacagtgaatcggatgattacatcagcgcgggggctactctgtgttccgatggcgccaagtatcgccacgcgactacatttgacaccgatgactagtgaacacgatgcgtttggaacggcatttacagtctcaacggatcaccatacgacgtccacgggaatctcggcagctgatcgggcgaccacgattcaagcgttagccaatcccaatagtcaggccgctgatttctatcatcccgggcacgtttttccattgattgcgcggactggtggattgttagcgcggcgtggtcatactgaagcggccgtcacgttagcacaattagcaggtgtgacccccgcggcctatatttgtgaagttatcaagaaaaatggcttaatggcgcggcgccgtgatctcaaagctttggcagagggcttacaattaccgctaatcaccattgaagatattaccacctacgtgattcaaacgggtgccgcccagctgacaacgaccccgagtgtcaacttaccgaccaaggatggtaagttcacgatgactggtttcgaagcccccggtcatacggcgttgccagtggcactgcaagctggtgatatcagtggcgatgaaccagtgttagtgcggttacactctgaatgctttacgggcgatgttttaggatcgcggcggtgtgactgtggtgatcaattacacgccgcactccaaaagatcagtcaagctcagcgcggtgttttcgtctatttacggcaagagggtcgcggcattggcttggctaacaaactagcagcttacgcacttcaagaacacggggttgatacgtatgatgcgaacgtgcagttgggctttcaaccggatgagcgccggtatgatattgcggcattaattctacgccaaatggggattacacgggttcgtttgctgactaataatcttgacaaggttgagcagttacgtgcagcggggattgatgttgttgaacgggtccccttagaaataccagccaatcagtacgatcaagcttacttaaaaacaaaacgtgatcgatttcatcatcaactcacactaacggagggacacgaatgacaacttttaacggcaaaattaatggcaacgggcttaagattgggattgtcgtggcgcgtttcaatgcgtttgtaacgcagcagcttttaactggggcacaagaaagtttggtacagcatggggtcaatgaaaccgatattgacgtggcctgggtaccgggagcttttgagattccactgacggttcaaaaaatgattacaaccaagcgctatgatggcgtgattgcacttggggcagtcattcggggtgcaaccgcgcactttgactatgtttgtcgtggcgtgacgacggggattgcgaccgtcagtttggcaaccgatacgcccataatgttcggcgttttaaccacggataccattgaacaagctatggatcgcgctggctttaagagtggcaataagggtgctgactgtgcggtcagtttgttagaaacgttggacgtgcagcgggcaatattaaaagctgacttggcctaaatgacgtaaattaagggtatgcataatatttcaaataccatcaatttgtaacttgggccattgttgatgccactgcttctgtgccattcgctgctgatagattgccatgtgcttggcatcctggcgatagtaggggattggggaacagcgaaagtttatcaaatcgtctacaccgtatggggcgattagcttgatttgattttcgtctaaaaaggcgccaatacaagttggaacttcgacaaagtgaccaattgcatcggtaacggaagtgaattcgggatccttatcaaaattataatgtgccatatagacctcattttttatttgccattggtattgtggggctttatcagtaagttgctgatagatttttaaatcatcgctggctggtcgctcagggtcaaaaaagacgacgtcaatatcactgttgaacatcactggctgcccgctgagtacttgccaaacagtattacggatgctaccagccgccaatgcgccttgttttaaatgacagtcttgaattaattgaagaatcgtcattaaagcaggagttgttttaataatatgaataactcgttgttcgttggtcattgaaaacacctcaatttaatgttggttaaaaatagtctaacatagtaatgatatcgtgcaattcaaataaaggatttgcttttgctgatttcataaaaaattaaggccgcttaccactactaactgatagtggtaagcggtcttagtttttggttgtgagtttaagtaataattgcctagtcttccgtaacctcaatcttaccaactgcaattggtagggttacgtgagcatcatacatgcccacttcaccagcgactgatgcaggtagggctaagtcttgtgggacgccgtgaatataaatgacccgcttgtctagttctaagtcatcggtaccgaagacttctttgaacttagcctgtaggtcgcctaagggcacatcgatttcataagcgaagtggccctgcgcgtcggcaactgggtaattatcatttggtacgtccatatgatggggcgcattatcaaatgggaccatcgtcgtcccagaaacaggttcagtttcaggcaagtctacaaagccgtcgtgattgacatcttgggccatagtagcaatctgtgccgctttgccatctggaaagccgtggaaatgttcccagtgttgcgtgttggccggggtatcgaacatttcaatggtgacgtgtaattggttaccagtttcagtgaaagtcgctgtgccgtgtggggcagtaccgattccttcggcgttcagcgggacgatgttagcaacgtattttttagtcatgaataattcctccagttcttcattatatggtcagtatatgctagtctaatcatataaaaattgacatagatcaagaaaaggagaaattatgcattcaaaaatggattgtgtgagtcgttcaccattattttcaccgctagcgccagcggtgaaagccaaattaatcacggtgacccatcaccggaaattttatcaaaaagggcagttgattcgtcagccactcgaccatcaggaaggcatgctcattttagatgagggaatggctaaaatttatgccttagctgctaatggtaaggagaaaattattgagttgttgcgtagtggtgatgtcgtcggacaacactggctatttgcaccgcatgagaatcagggatttattcaagccacgagtgatgcgtgggtctgttccattcaatatgatgattttcagcgattattaggtgaatcagccagtttatcattagcaatgatcaataattttgggaaccaattgattgaagctgagaagaatcaattgcgacgagatttgctggatgctaaagcgcgtttgatggcgtatttgcgcgattgtgccgttgaatccggacaaatcgaatttgaattgccgttgaagaagaaggaattggcgaatattttggggattactcccgaaaccctgagtcgtcagtttaaacaattggcggctgaagggcagattatcgtcaataagcgccagattacaatttgttagacgggtaaaggggggcgtcgcctggttttggctagttaagggtgacgctggttcaatattaaaaataaagtctgatttccaacgcagtatgggctaggaaatcagactttatttgacttgtgaggaagaggttctttaatgatgaaaatgccggttagcaacgccacttgctcgcaatgccggcaaaacgacttgatcaatgagattggtgagttgctgatcagtgttcatcggttggttgatgatgtcgcagtaccgtaattgttgaaacaatactaattgtgcggcttggttaggccaaatctgaagttcaccgtggttttgtgcattcgtcagaagtggctcgatcaaggtcaagttggcatgatcaatttgagtcactaactgcgtgagatcgcgctggttctgcgcgttcaaggctgtggcaaacaatagccgaaaatagcggaagggccccgtactagtttgttggataaagcgttgcgctaacagaatgagatcggtacgaagactgccagtatctaatggcgtggtcgtaagtgcaatgggagtcttttgtatttgatgaataatagtatgaaagatgaggtcaaaggtcgaatcccagtagcgataaagaacactgcggctggtagcggccgcagtggctactcgtgaaaaagtgacctggtcgaggccgtattgactaagcagggtataggtggtgtcataaatcgcgttttccagtcggttgccacgtcgacgttgattgagttgggtcacaaaaagatctcctaattggttttagaaacagtttactgctttttgtgccttaataatagtgatttccgtagccaaacgattgttgtagttaaagacaacgtgtatcttaaatagcgttgttaacaataatttaagtaatcagaggcggaaaatatggcaaaaattattattgtcggggctgcacatggcggccgcgaaacggtcaatggcttattagcagctaatacggataatgagattcattggtacgagcacgggcaattcgcgacggctttggattgggctccggcggatgctgaaaaagagcggttggccttgtcccagcaggtgactctattcgaccaaacgacggtcacaagaattaccccagcgacccacacgattactgctcgtaatcaacgggggcaattacagactgatcattacgatcgattggtattgagcgttggatcgttaccaatccagttaccgattcccggagccgaattatctggtgttcgatcgattcaaaaccgtgccagcatcaatgagttaaaattggccgctaagtcagcagccattaaaaacgtggtcgtgattggaggcggctatattgggatgaattttgcagccttatttaaacaaaccggcaagcaagtaactgttattgatgtgaacgctcggccattcagtcacaatcttgattcagaatttacgcaaattttagctgcagcgagtgttgagaatgggctgcaattaaagatggaagagcgggtgacggccgtattaggttcaacacacgtgacagcggtacaaacgaatcgtggtcagtatgctgccgacttagtccttgtcgcagtcggcaatcgaccgaatactgcatggctacggggaactttggcgctagattctgagggattaattgagacggatgattattttcaaacaagtgttccagatatttacgcgattggcgatgcgactaaagttcggtttacgcccacgggtactaaagagcggatcactttaggcagcgcggccagtcatgccggtcggttattagcgcataacttgttaacggatcagcgaattgtgtttcccggcgttcaggcaacgtccgcgcttaatgcggcgggatattactttgctgctacgggcctaaacacgcaactagctgtccgtatgcaacaaccggtgttagcaacttacatcgcggttccccgattggtggcatccgcaccagctcgattgaatgcgaccgttcattttaagttgttttatgataaaactcatcggatactaggtgcacaaataatgtctacagcagaattaacggcggtcatcaataccgtttcgctcgcaatccagatgggagcaacgctcgagcaattagcctatggtgactttttctttcaaccgggattaagccagccggtggatgtactcagtacggctagtttacaggcgttacaaactttagccactaactaggttgattattgccaagcccattatacggacttggcaattttaagttgatgtgttgcttaagctcagtatatgacatggaaaactagtggttactgatgattagctcattaggaactcacaggaaaaaaccgtcgcgtcatcaataatgatgggcaatccagcgacggtcaaatttaagtgatgaaatcgacaattattgtggtggtctaatggtgctttgaagtcgcgcttccaattgctagagttggggccagtacttaaggtgtacggccgaggagcctcagtttggcacatttaattgttagttcgtcacgttagccgttagcgtccaagttacggttgtgttataggtttggcccgcttgggcggtgttgccaggaacggtcaattgaacttgggtgggttgccagacgttggttgaaaggtctttccccacgttggccgttgctggggctgcaaagacgggttgttcggcggttgtgagatcgaccgcgtagcttttgagctggcccgtagcgcgttcattataggtctgcccggcaggaatgtgtaacttcgcgccggtgagttgggcgccactagtactagtaaaaggactgttctggcgggcggtgacggtccaaccgtgagttgctaaccgattatccgaaacttggagccactgtttcgcgacaccgttgattgtctgggcggcgtaagttttaggctgcatacttgttgtgacactgccaaagttaaattggctgggcgcgtagtctaaacgaagttcgcccgtattaccggtcccagtgttttcgctcccactggtattggtcgtaccagggtgctcgggctcagttggtgctgtcgggccgattgccggtgcgacagtgtattgggtagcggcggcaaacgtggcatcatgataagttgtactggtgaccggattctcgttccccgcactatctttcacaaaaatctgaatgacgtcattagcttttaatttggtggctggcatcgcaagggaccaactcccatcactggcagcggttgcggtgatggcattgccgttgctatcagctgcggaggtcccgttaaccgtgtaacgaagtgtgttaccagccgtcgtcgtggaaccgctggcaatcgttttttggtcggcaacgatttttccatctttaacggttaccggcgtcggtggcgtcttatcctggacggttatggtgacaggatctgaagtataggtggtcgttgcttgagctgtcatagtcgcgccggccgttggaaaatgatctaacgtgaaattaacgtaaccgctgctgtcagtcgtaccactttgcgttgcgccttgatcatctgttaacttgacggttgccgtgcccgttccggcgtaaatcggcgtttgtgtgccattcgattctgtataaccggtgataacgcgaacgcggaccttcttgtcggcattggtgacgagctgggcgttcaagtcactcgtatacggtgagctgaattgcacagtcggcagtgagagggtgttcgcaattcggcgcgcagccgagaaggtgagtagtcccggtaagacgctaccgctgttggtaatcaggaccccgttctgttcgatggcggtgatcccttgataggtcacactggcgctcaacaggttcaataaggacaatgaccacatactcaggttactgttcgtgattttgaaacttttaatggtcgtctcgacgattgaccccgtttgaacgagaattgcaaagttcgtatttttaatgtcgtaggccttaggagaatctagcaagacgctcaaaccggacatgtagccaccaaaaatgggggctgagccactactagtgatatacaactcaccacccgtcacggtaaacgtactgttgttgccaagcggaatcaacggggtagtgtagtagagcgcattactactagttgtggctaagttctcaaacgtgaccttactgccaacgttggcggtaaacgtgtttgctgtttctgcccgatagacgttaccgtacatcttggcggttaggatagcgttggtatccaccgtgacggcatcatactggtcatagaaaataccccgagtcgcgtctgatgcgctacctagcaagttaacattagcagcgctaccaatagtgactttacggtctccagtcccaactgtactagttgccgtgaagttgaagaaagctttgttggcggcactgttattcgccttgcgaccgatgtaggtactgctggcggcaaaggtcattccaccagtaatcatgttttcagcgacggttgttgcggtgactgcgccactgacattgacttgattaccaggagcgttgacgaggcggtaaacgtcgctggtagtgattaaatcggtcactgtaatcgtccaacgagctccaccagcattagccccaccatcggtcccactttgaatgattccggcggcgccaccactacttgttccactcgcaattgcgccacgaatactactgaagttttttactgtcattgtctgggccgtggttgtggaacccaatgtgaagttaccgatgccgagatcaaggctgtgattttgcccgtcgatggtcaggctggtggtacgagtgcctaattctgtagcacttgttgacgtgtgggtaatgttggcccccaatttaatcgtcgtgacggcggtattggtatacgctgattttaaatcatcgtaagttgagacggtcgtgctaccatctggattgaccacgattgcggcggtcgtgatatcattagcggctttggtggcagtcgctttcggtgtccgttctacttccgaatcagcctgcgctgtgcgactagtagcagtgtcgttgtcagcagtcgggtccgatgtcgcggtggtactagacgactgttcggacgatttgcttgtggcattgttgtcatcacgtttcgtggtagccgcttgtgttgctgttgctgacgaatcgtcagtggtcgggtcttgactggccgaagaggtgctttcggcatcattgctgacctcacgtgctgattcagtgccggcttcttcaggaggtgagtcgactgcggagcccgcggccacggtgaaagttattggttcagcggtcatggtgtgggtcgtcggtttttcactactggcgacagctgaagcggtagtggtcgctaatgctggcccagtaatcagtgcttccgcggtcactttgtaggttttcgcttcactggcactcaataccaaatcgaacgtggtactggctgtcggatcagatggcgtcaaagttagtttccggttgtcagcatcaaaatccagctcagcgaggctcgctctgttggcttgccgggttttagtttggtcaacggtgagggcctcaggaatagcgaccatgacttggtgttcctgggaaccttgtacggccaactgaagtgtaaaaggttgcccaatcactaattccgtgggtggttcctcgaatttgattggtgtggccgtggtggtcgctgtcgcataaatggcaccgccgttgacaacgagtagactcattaagagaacgagtaacccgagccaagccgttattaatcttcgtggtcgttgcaaattgctcactcccttcggcgttgcatgagccacacgagccaaccggctaagacagctgtcaacagacctaaccagactaacagttggcgggcttcattcgtttgtggtagcactgatttatctggacgtattgccgcggatgatggtgtctgagtcgaagcctgttgattagcagtggcgatgatgttgggcaccgctagatattgatagggacgggggtgctggaagtttgtcaggtccgtcccggcttgccagtcggtcaatgtcacactagtgtcagttggggtagccgctagggcatcgggactccgacagccaccagcgagggctagtccaaggcttaatgatagtaaaactagccgcctgaatttagccataacgataacctccttgtttgagtaccaagttagaagataatctaaaattaactgcttatttaggttctgcgattgtgtcgtttcataattagataaacgattccggcggataagccagcaattacaatgacgattaggacgtaccaccagatactgatgggggcggccgggtcattcttggctttttgattattttgacgtgcttgttcagtcgtaatcttaaagtcccgggaccaatgccaagtttttttggcccatttggagtcgttagtcgttgcggtgacggataaggtataatcacccgcccgcatgacttgatcgtctaaaaaagtggggtaagtgaagttcgaattgggggccatgatcaagttgtcgctactgttctgatagagtaccttggaactgccttttctcgtgaccttagtggtcagttttaattgcgagaccactgctggttctgggttccgaatggtcgcgagcacgactttgcgatagttgcgtaatccgggagtgaccgtccccaaagtcaacttaggctgtgcaatttctttggccgtcagtttaaccgctaacgcataactatatttttggttaatattgacgcccttggatgcttttttcgcgccttgccccattttttcgaagtaccatgagcctaagattacaccggtatcgaatcctttgggaatgttgattgtggcgctgacgacccggttacttttggcggggaccgtgactttatcggaaccggctgccaaagtcgcaatttgatcaaaacgatattttaagctggcatcgtatcgtttggctgtttgggtgtaagcgatttggcctgaatcattcgtaaatgtcgtgagtagctgggtcttgaccgtaattgattggtcagtcgggttatagacccgcgcctgaattttacgagtggtgcccgccttggccttaaggtcgaaaaacggactgctagcatcgacttcttggccgggactgattttgttaacactatattgaacttcggcattggtagcggtggcctggacgcttggtgaggtccaactcatgaaaaccaagccaccaattacgccgaataagcacatcaattttttcatgattacctcctagttagtggtagcggcgactaacgtccaaactaagttgttcgtgtagttaccgacttgggctgtcagcttggggattgaaagggtcacggcacccgcgttccaagtgtttgtggaagtggctttaccaacacccgcccggttgggggcactgaaaacgacttggtcagcggtggtgacgcttacactgggggcaacaactaaattggaatcggctactgaggcgggctcgtttagcgaattacgcgcagttccttggggtaggtgaatcaccgcaccagtcagcacgtgattattactagcgttagttaacgtccggtcttgcttaacgttgacttgccagccgttggcagtggtgcgtttgtccgagacttgtagatattgattgtagttgccaattgcagtgtaagttttggctgcgttggacgtagtgacggtaccaaagtcgatagtttttggggctacatcgagggtcaatgttccggtattgttagttgccggattattcggatcggtggttgtcaacgggacgttgggactagtgggatcaactggggccgtggcactagtatcatcttgaaaagtcacggtaccattagtcgttgccccgagagccgtcaaactggttgccattaaccctaaaatcgctaaccccgtactaagacaaaagcggttaaacatggcaatccctccttatggttagctaggggtagcagcggtcaaggtccatgtcaaagtgttgctgtaggctcctggtttggccgtgtttttgggaatcgtcaaagtgacatcacttggatcccaaactttaaccgaagtgcctttaccagcgccggtagtggccgttgtattaaaaacggtcacggcaccactcgtattggtaacatcggcagctgtagtcgtcaggttggtatcgaccgccgtagggtcagttgccagactattacgtgcaatcccggctggtacgtggatggtggtaccggtcaaaacatgcggtgaacttccactagtttcggttaaatcttgatcttgctcgacggttacggtccaaccctgttcatcggtcccacggttatcggtgacctgtaaatattgttgcccattagtggtcgtcgtggccttataagtgtgttcggcggcataagtttgaacggagccgaagtcgaaagttcgaggagccacgtctaatgttagagcaccagtattaccagtagctggattgtctggatcttctggaacttgtggattggccgggttagtgggatctactgggatagttggtccagtattttctgtcaattccaaattagtagttgtgttcgcagttgaatcggcggttgccatgacggcgggcattcctagtaagcttaacaacatggtcgcggtaagcactgtttttttcatgatggatcgctcctttttggttgtccgtgcctgcggtgatcaacaaatgtttggtaacgataatcaactcctggccagaagattgtcttgcgtttatcgttgctataaggctagcataatctattaggttgcggctatttttatgcatatatttaatgattagcaattagtcttagcttattatgttccgagggggttctgaatttattgtgatagcactgatatttgcgccaatgctggcgataggggataataaaatcataaatttttattgatgactttgaataattagactgactagcgaagtgtgcgtgaaatgattaatcataattaacttgtcagctgattgatctgctaaatagagacgtatatttctagcgcaataataattcatgcttgacgcgctagacttagtacgacgcaaaaaaagccaccctgacatgttaaacgtcagggtggcttaattaatttaattagttagagcttgatgaagatgaggttgaaaggtatgacgataagatatccttcaaatcgttatccttgattgaaacgttcccacccttaagcactttagaaacaacgttttgtaagacagtggagtcgctcatatcattgtcccaaatttgtttcttcaaatcagcggtgtgatcagacatcttacccttaccagggttcttgatcatccggatgatttcataaccgttgctggtcttaacagcggaagtcgtgtattcaccgttcttcagcttgaaagcagccgttaagaatttagatgagtagctcgtgttagtgttatcaaaggctgataacttaccaccatcattcttagtcgttgtatcagttgaatacttcttggctaacttcgtaaagttggcttggctagaatccttcttcaaagcgtctaagactttgtcagcagttgctgatttggcaactaggatatgttgaaccgtgactttaggttcgtaagacttccattgcttcttcaaagctttatcagtaatcttgaccttgtctttaacggcttccttcaataataagttagaacgtaattgttccttgaaggtcttggtcgtcaaaccattttgcgataagacggttgagaaagaactaccatattgtgacttgtaagtattatattgcttcgtcacttgcttagtcgaaacttttgagccgtaatccttttcgagcaccttattcaggatcatttgttgcaagacttgcttacctgaagaggttcccttcatactactgtaatattggctttcggtaatcttaccaccggaagttgatgcaacggtcttgctaccacaaccagctaaggtgaaggttagtaagacaccagcaagggcaatgagccatttcttcattcctaaaacacatcctattcttgaaatcgttctgcgttagcagacttcaacgactactataccatatctattaaagcttctgcatgcatatggaaatctttacaaaattttcagagatttcacagcctcttcataaattctacctaatgcgtcagtgaatttaaacgaaatcagcttgttaagatagcaaacaaaagaatcgtgggcctaatgcgacctcacgattacttgctcagtcggttgtcttggttaaatggtctaaagtgtcttgtaagtgatccgcacgttttttcatgatggttacgtggggttcaatcttaaattgaaatttatccaattcagtctgaatgtcatcaaaaacttccgcagcgtgggccatttgaacactgagattgctctgggcatcgctaaactcttcacgtgcgtcttgtaagttatcagcagcatctaaaacgtcttgcacgtaacttttgatgtctgtgtagagcgctttaggtgttttctgattgatcaacatgtaggtagcagcactgagacccagaccgatcaggctgttacgaataaactttgccatgggagacctcctaattagctaattcagttttaatggcgttctgtaagcgagtgtagtcggtttcgtcatattttttggcgttgtccttaaagatcatccgaaaatcatctttatcgctgtagcgggggatgaggtgaaaatgggagtggaagacggactgataagcgaccgcaccattattgttaacgatattcatgccaatgatattctcgtcagttgctttgatagcgcgggcgatttcaggaatccgcgcaaacacgatgctggcaagatcacgatcgtaaccgaaaatatcggcaacgtgcgtcttcggtacgactaaggtgtgaccaggagtaccttgcgagatgtcaagaaaggctttgaccatgtcgtcttcataaacggtatagctcggaatatcgcccttaattattttacaaaagatacaatcgtcatcgagttttggttcaaaagctgtcatgtgataaccttctttatttattagttgggttcattatacactatcgatgttgcggcaatcaaaactaggtagcttgattgacgacaaattactgaagtttcggtaaagtcggggatcaatgagccaaccaaatagagggtgtcgtgatggctatgctataatgggagcacttataccaacacagaaagaggttaacgttatgacattagcggtacaacacttagttggtgggtattcgcaaattcccgtcttaaaagatattagttttcaagttgagcccggtgaattagtgggcttgatcggacttaacggggccggtaagtcaacgaccattaatcatattatcggtttgttgacgcccatgaaaggatcaattgcgctcaatggcgtgacattagcacaagatcctcaaagctataaaagccaaattgcgtacattccagaaacacctatcttatatgaagagttaacattaaaagaacatctagaaatgacgatgctggcgtatggtttagaccaagaacaggcttggcaacgggctcatgacttattgaaaactttccgattggctaacaagttggattggttccccgcgaacttctcaaagggaatgaaacagaaagtcatgattgtttgtgcgttcatcactaacgctaagttgttcattattgatgagcctttcttaggactggatcctttggcggtgcacgacttgttggcattgattgcgacagtcaaagcacagggagccgctgtccttatgtcgacgcacgttttggacacggctgaaaaagcttgtgataagtttgtattattgcatgctggtgaagtacagacacaggggacttttgctgaaatcaaagcgaattatccggatgcgggtgagtcgttaaacgatatttatctttcattgaccggggtgacccgtgatgaatgagttatttcaaacgcggttgcagcggcatctgcgtcggatgttgcgctacctaagattggtgttcaatgatcactttgtcattgcattgatgttttttgtcggcggactcgggctggcttactccaattggctcaagacgcttggccctcagcagacgtggatcgtctgggtgctcggtctcttattatgggcgggcctaagtgtcagtcatatcgcaacgttattagaaccggccgataccgttttcctgttaccacgtgaacgggatgtgcatgcgtacttcgtgaaagcgtggcgctacagttggtggttggcgcaagcagtccaagtgatttttgttggcttgaccgtgccgttgctcatgatcgttgatcagatgacgggctggtcgttgctggcgttactcatcacccagttggcgttaaaggatgcccagttaacgctgagcgtgacgcatctctatcaagtgaagccaagcatgaagcggtggttgcgccccctgaactgggccggcgcgttcgtcacgttggcagtgggactattagtgacgccgtggttgagtgccgcaatggccatcgcgattgcggtgggacaacgttatttgcaccaacgaatttggtcgaccacggtgattgcttggcgtgacgacatcaaagccgaagccaaccgtatgttagggatttatcgattctttaatttatttacggatgtaccaatggtgcaaggcagtgtcaaacgtcgtcggtacctggattggttactacggtggttacctaaggaccagcagcatgcgtttggctacctatatacacgtggcatgttgcgcggcacggaatttagcgggttagtggttcgtttgacagttattggtgcggtgctactgtactttagtgggcacggttggttagcgatggcgttggacgccttatttatttacttgattgggtttcaattgttgccgttttacaagcaatacgataatatagtttttacgcacatttatccgctggcaactaaacagcggttgaaaaactttcagcggttattgcgaaacgtgttaagtttgacgggattaatctttttagttgcgttctggttaagcaacgcaccgttagctcaagttgggattttgctcatcattaacgtgattgaaatctatctcttagttacttggtatttaaaattaagattagcttaaaaccttgatgtatcaagggttaaaaaggacttgacggattcaactttcgtctataaaatgtgattgttaagtcaaataataatgagtcattaaataaattttgagaggagtggggctgatggatttcgaacttgatgatggctgggacgtttacccgatctatgggaatacgaataaagctttcatgggcaaaaaaaatcaccaacgattgttcttaaagcgaaacgcctcgccgttcctagcggcgctgtcgatggaagaaattaccccgcgattaatctggacgaagcgtatctcaagcggggatacgctgacagcccaagagtggttgaatggtcaaactttaacgaagcaacaaatgcggctgcctgaagtggcgcatttattggcacgtgtgcacaattccgagttgcttcaccggatgttaagaaaagtcggtggtcagagtgtccgcccacaagactttattcagcaatacttacaagatttaccagatgatttacggcaccatccgttaatggcccgggttctggatgaattaagaggaaccgcacccactttaccggccactgattatcgcgtttgtcacggtgatcttaaccacaagaactggttactatctgatcgccaacaactgtacttggttgactgggattccgcacgatttgcggatccggcgtcagatattagtatgctactatgcgaatatgtcccgttaagtgattggcaacagtggcttagtgaatacggtgagactatgacgaccgccttacggacgcgagtggtctggtatgctaagatcaatttactattgaatatcaaagataattattatcggaatcagtaccatcagatgaaccatgaaattatctttttagaagaattatcgcagtacgaagtgtaacgacgagcaacaaaatcgccgcgagtcccagatggaattcgcggcgattttgttgagtaagcaaatgaagaaggagtcaatcaagatgcgtgtcagaaataaaccgtgggcgccaaagttaattgccgcccatcccgaacttattaccgaagatccaactcagctaaaaggccgctggcaaagccgttttgccaaaccccagccactccagattgaagtggggagtggaaagggccagttcatcattgaaatggctaagcgtcatcctgagataaattacgttgccattgaaattcagacctcggtgattgcgattattttgaaaaagctagtcgaggccccgttgcctaacctgcaattggcacatgcggacggtcaagcggtgactgcctttttcgaaccccatgaagttgatcgcttatatctgaacttctctgatccgtggccgaagtcgcgtcatgaaaagcggcgtttgacctacaagtcgtttttgagcagttaccgggaagtcttaaaacccaacggtcagatcgaatttaagactgataaccgggggctattcgaattttcattaacgagcatgaataactttgggatgcaatttgaacaagtttggttagacttgcatgcagttgccacacctgaggataacgtcgagactgaatatgaacagaagttcagtgcggcgggcccaatttataagattattgcaactttcccagcaaaatagactgaatgagaacagcgaaacgcgtcggcgatcgctgttttttaattgagtgtaattgtcggaaacatcaaaaatgagcttccagaattttaattccagaagctcatttttgatttttgatgcggatagtcaattgtgagttattaaagccggtaaatgtctaaaatactaccagtattggcatcggccaaaaactcgtactgtaccagctgaccatcttcatagcgggtaatgccgccatagtagacatccgtgcgcaatgcgaacttttgtaatggggattttttcatttcaatccacgagcctttaatcggtgcttccttcaaaaacgcgcgcttgacttggctaagaatttggttaggggtggggcggcgcaaccgcttgaacaggccgccaacggaaaagcccccggcgataccagccatcccaaccgctaacaagccgccatattgtaattgtttattcatgatgttgcgtctcctttcagctaacttgactaggaaatgttttatttaaatttagtataccaatgattgacgagaatacaaagaaaagtcataattaatcagtatgatttaagtaaaatacgctataatatagtgttgaacgctaaaatgagagtaaaggggtttcacatgttaattacaagttataatccatccgaattaggtgacacgttaatcaccattttacgaccagatgcggccacccaaacgattgaaacacatgccaatgtgacgcgtattagcgatgctgacagtggggaaaccttgggctataatttctttgacgtttccaagacgttaggcgacttagatgccaatggtcaagttcacttaacggccgaacaagttgagcaattaaataatttattaaaaaccaatgattttgaacctgaattagttttagacactgaccctaagtttgtggtcggctatgtggaatcagccgaagcacatccgaagtctgatcatttacagattaccaagacgaatgttggtttggatcaaccacttcaaatcgtgagtggttcacctaatatgcaggcggatattgtggttgttgttgccaaggtcggtgcaatgatgcccagtggcttaattatttggccgggcgaattacggggcgttgagagtgatggcatgattgtttcaggccgagaattacaattaccgaacgcgccacaacggccaggggctttgattttgcccgccgattatcagccagtgggtgcgccatttgatttcaaacgcgctcagacgttatttaccgcttaatttgcagatattaaaaactaggatgattgaaaatgaaccattatgatggcccggcatttttccggaaatatcgatttaacaaaccacaagtgaataattcagcggccagtcaatcaactcctgtagcggcatcggctagtccacaatcgactgctggtgcacctagtgcggcgccaaaacggccagccagtcaaactagcgccaagcaggtgacgagtcaggcaactacttcgagtagcagtgctgcaactagtgcgaccctctttaacggtggcacccatgggacttttcacccatcccgggtaccagcccagcttagtgcggcgctgacaaatggcggtatcattcaggatcacgatgaccgtaattatttagaaattgaagcgagcttgcataagcggcccgagaccttcttattgtttgcggatgcagcagctaatgatttaccggctgttgatttgcaacaaccgctttctgatagtgggacggacacgagtcaagttgaacacccgagtgattcggcagttcttagtcaagcggaacggaagatggcttcaagtgttgacccgacaacggtaactagtcaggcagcatcgagcgtggctgctcaaacggtcgtggctaacacgtcacagaccggcagtgattccacggtgtccgcagcttcggcgacggttgtgcgaccaacggaagtgtttgaacctaccactcctgaattagctgtgtcggctgcggcaattaatacgcctaaaaccgatgattcagtggtagtgacggctcccacggaagtatttgagcccactgacccaagtttagcagcgtcggcagccgccataaatgcgcctagcgcggtaagttcggcaatatcggtaggccccacggaagtatttgagcccactgacccaagcttagcagcgtcggcggccgccataaatgcgcctagcgcggtaagctcggcagtatcggcaggccccacggaagtatttgagcccactgacccaagtttagcagcgtcggcggccgccataaatgcgcctagcgcggtaagtttggcagtatcggcagggccgacagaagtgtttgaaccaactgatcccgcgcttgctgaatctgctgcaactgttaatgcggctgctgatcatgataaaatagaatctgctgcgactagtgcgacacccaagtcagcacatgggctaggactatccttaggggatattatgaccgctgagcacgatgcccaggcggacttagcgttatttaaggatcagccaacaacggcggcttctgcagcaccacagtcaagtactgcgcagactcgttcacacgttaacgaagaaccttatcaaccggttggcatgcggccaactagcacaagtcctgctgtgacgtcagcaacggccacgccagtcagcgttgtggcatcatccacggtcccttcacaagaaagtggggaagcgactagtgtgactatggcaccgtcacaggcggctacttctgcagttacaactagtcccgctttgtcagagacatctgcagtggcttcacaacctgagttagttcatagtggcggttcagcggcccccgtccttgaggataaagaattagcggcttatcatttgccaccgctgaatctgttgaaagcaccgatcgtggccaatgaatctgagatggatgattggatcgagcagaaggccagtgcgttagatgaatctctggacgcatttggtgtcaatgccaacgttgtcgattggacgattggaccaactgtgactcagttccaagtaaaacctgctcgtggcgtcaaggtcagcaagattaccaacttaaatgatgatttgaaattggccttggctgcaaaagatattcgaattgaagcgccgatccctggccgtaatacgattgggattgaaattccaaatgcgaaatcgcggccggtgatgctgtctgaagttttagattctgacaaattccgcgacagtaagtcaccattgacggtcgcactcggtgtcgatttattcgggcaaccacaagtcactgacctgcggaagatgccgcacggtttgattgcgggggctacgggttctggaaaatcagtcttcatcaatagtatcttggtttcgattctgtacaaagcgaacccacaacaagttaaattgttgttaattgatccgaaggccgtagaactagcaccatacaacgagattccacatttattagcacccgtgatttcagaacccaaagccgcttcggcagcgctgaaatgggtcgttgatgaaatggacaaccggtatgataaacttgccgctggtggtgcccggaacattgagcaattcaacaaactggccgacgaacatgacgagccggctctaaaaatgccgtatatcgtgattgtaatcgacgaattagctgatttgatgatggttgcttctagtgaggtccaggattacattgcccgaatcacccagaaagcccgtgcggcagggattcatttattagttgcgactcagcggccaagtgttgatgtggtcactggtttgatcaagaataatatcccaacgcgggtggccttcatggttgccagccagatcgattcgcggacgattctggacgcgagtggggcggaacgtctgttgggacgcggtgatatgttgtatcttggcaacggtcaacccgcaccgattcggttgcaggggacgttcgtggacagtgagatcgacagtatcactcagtttgtccgtgatcaggcagcaccgcactatgaatttcaaccagacagcctagtgaagcacgaggaagcagcacgcaatgaagatgacttgatgcctgaagcattggcttacattgctgatgaagataccatgtcgacatcgaagttgcaacgaaacttctcgattggctataatcgggcggccaatattattgatgatttggaaagtcgcggctacgtttcagcagctaagggttccaaaccacgagatgtttatttcacagcggcagatttaactaaattacaagccaattcataattaaaaataaagcgattcacctcatgattgatgaattgtgaatatgggagattattagcataatggataaagcaacggtttattattttgttgggatcaagggctctgggatgagctcactagccttgattttacatgacaagggttaccaagttgaaggctcagatattgaacaatatacgtttacgcaaaaaggtctagctgcagctggcattaagatgctaccgttttccgaagataacattcgcgaaggcctcacagtgattgcggggaactcatttactgatgaccatcctgaaatcaaaaaggcgcgtgaaatggggttgcccgtttatcgctatcatgaatttcttggaaaattaatggaaggcttcacgagtattggtgtggccgggactcacgggaagacgtcgacaactggtttgttgtcccacgttttgagtcatatcgctcccaccagttacttgattggtgatgggaccggtaaaggcacccctgacgcgcgtttcttcgtttttgaagcggatgaatatcggcggcacttcgttgcttaccatcccgattatgccatcatgacgaacgttgactttgaccatcctgattactacaaggatttagctgacgttcaatccgctttccaacaatttggcaatcaagtgaagaagggcatctttgcttggggtgacgatgaaagtttacgacacctcgatgttgataccccaatttactattacgggacgaatgaccgtgacgactttcaagcggttaatatcaaacgaacgactaaggggtcttcatttgaagtgaagtatcacgatgaatcgttaggggaatttgaaatcccattgtttggtgaacacaatgtcttaaacagcacggctgtcattgcggtttcttactttgaaaaggtgaacttggacgaaattcggcgggaactcctcgactttagtggggttaaacgacgtttctcagaacatcaagttggcgatatggtcatgatcgacgactacgcacatcatccatcagaaattaaagcaacattggatgctgcacgccaaaagtatccggataaggaaatcttggccgtattccaaccacatacgttctcacggacgaaagcattgatggatggctttgcagccagcttaagcaaggcagatcacgtctttttgaccaatatcttcagttctgcccgtgaaaaatctggtgatgtttcctccaaagacttagctgctaagttacccaatggtggtgaaattatcacgaccgatgacatgtctgctttaacggcttaccacaatgccgtcgctgtctttatgggtgctggtgacattcaaaagtacgaaaaaatttatgaagaccaaatgaaataattcttaaaaaagcggccccagcagggccgcttttttagtccgtctttaaattgatttagcgtaaaccggcgttagcatccaagatgaaaccctatgagagatgttagattattgctagacaacagttgtgcgacctattttgaccttacaagttttaatggaacttatgcagtcgataaataaagcaccaatgaggataattcactagaatctccgtcattggtgttttattagtgtgtatgatttctaaggattaaccacgtggttagtgaggcaggtgcagtagtcttagttttgttgcttctgggctttgtttaacattttcttagcttcacaatcatagtcgcaggccgcacatttgccctttttagcacgtttgaccacgcgataaatctgatagccagcagccccaataattagtgcgataattaagaaattaacgaataatgccatgtgaatcaaactcctttcagataaataattgaccaacttggtaaatgacgaaggccaaggtgtaagcaatgaccaaactcgagcagacggcgtaaacagcccacttggtcgatccagtctcggacttgatggtcccaatcgtggcgaagcacgggacatatagcaagatgaagacgagcatcgcgtatgcggataacggtgtgaaaaagcgccccatcatggcaatcaagccggcctgatttgcgctgtggaacattaccatcatactagagctgatgacttctttggctagaatcccagtaaagagggctgagataacttgccaagcagtcacaccgagtggcgcgaacagcggtaatagtgttttgccaagtgtcgcggcaaagctgttgtcgatgtcgctgactaagccgctagtgccgaatgaggaaagtaaccaaatcaagaccgtaccggcaaaaatgatagtacctgcctttttgatgaaccctttacccttatcccaggtgccacgccaaataatgtcagcccggggaatatgatactgtggtaactcaacgatgaagacggaactatcatcgacgttgaaaatcagttgataaaatttagccataccgagggcgaccgcaatgccaagaaagtaaatcgacaagacaattagggcctgatttttcgggaaaaaagcggccacaaataggctgtagattggcagacgggcggagcaactcataaatggggaaatcagcgttgtaattaagcgttctttaggttgttcaattgtccgggcggccataataccagtgacgttgcatccaaatccaataattagggggataaatgccttcccgttgagtccaatcatctgcatcaagcggtccgtaactagtgctgctcgtgccatgtaacctgaatcttccaagattgaaatacaggcaaacaagacaaaaatttggggaataaagacgagcacgccaccgacccctgcaattaggccgttaacaatcagtgagcgcaagaccgggatggctccagccatggtcaaccagtgactcacggtggtggatagtggtccggagacgaagctatctaacaaatctgacaggggcgtgccgacccaatcaaaggataatttgaacatcaagtagaagattcccacgaagacgggtagccctaagaacggattggtgacccacttgtcgattttagcagtcatctcgacgtggctggtgcttgccaagttttgactagcgctggctaaggtttgctcaataaagtctagtcgggtttggaaaatctgctcgtcgaatttttgagcgtcgtaataagcggcttgactagtgagtggtgtcaatcccatgtgtttcgcgtaggctcgaattggcttattttgattaataaattgaatcgtcagccaccgtgcgaagtctgctgtcaaatcaaattttttgatgagctgttggctagcctgacgaatggcttgctcaatcatgaaaggatagttgagtttgagcggtgtcgcggccggatggggacctgccaataagtcttcgcgtagctgatgcagcccttctttattgcgggcgttagtcgctttgatctgacagccaagttgttcagctagcgtgtcaaaatcataataatggcccgtccgtttgaggtcatcaatcatgttgagtgcgataatcaccggtgcgccaaattccaacacttcgatcgacagtagtaagttacgcttgagctgactcgcgttggtcacgttcagaattagatcagggtggttatgtagcagatagttggtgacgactgcttcatctttggtgattggattaagtgaatagactccgggtaaatcgaccatttcaacttcagagtgccgaatccggcccatcttcttctcaacggtcacgccggtccagttaccgacgtacgcgtatttatccgtcagttcattgaatagcgtggtcttaccagtattgggatttccgagcaatgcaaccgtcgtcatcttaatggcctccaatcaacgtttgaaatacggtgtaccgaatcccaatccgttgttgatcaatctgaacaattactggtccgtgaaacggatagtagcggacaacggccagcggactgccgacatgtagccctaagctgtgcaatcgttgaacggtctgattatccaaacctgtgaattgttgaatatgtagttgtgatgtattagtaacggattgacttagcataaggctcagtcctttctgaatattccaatagtgaataattcatcaaaaatattatacctacatcatagcatgaaagggcttttattaatatggggaaaagccttattttcttttgaaatgaaaacggttatactctaagtatagaatacaaaaaggccgatgctacgctatttttgttgaagccgttgactaatcattatatacggaaggaataacggcttgggtaataaattcaattgttggaggatgatttaaatggcaaccttggaagttaaagatttacacgttgaagtgacggatgatgagcaaaaaaagtctcgtgagattttaaaaggcgtcaatttatctatgaaaactggtgaaattcatgccattatgggaccaaatgggactggtaagtccactttatcacaaactattatgggccaaccggcttatcacgttactcagggtgatatcttgttgaacggcgaaagtatcgtaaacatgccagttgatgaacgtgcacgtaagggactcttcctcggcatgcagtatccagctgaaattcaaggggtcaccaacgctgaatttttacgggcagcaatgaacgcacgccgaccagccgatgatcaaatctcagtgatggcctttcttaaagaactcgacaagaacttggcactacttaatatgagcgaatccatgacggaacgttacctaaacgaaggtttctccggtggtgaaaagaagcgtaacgaaattttgcaattattgatgatcaagccatcattcgccttattggacgaaattgattccgggcttgatatcgatgcgttacaagtggtttctaagggtgttaattcgatgcggggcgataatttcggctcattgattatcacgcattatcaacggctgttaaactacattgtgcccgatgtcgttcacgtgatgatgggtggtcgaatcgtgaagactggtaacgccgacttagcaaagacccttgaaaaagaaggttatgctggtttacgtgacgatttgaacattgatgtcaaacttgttgacgacgaagattagggggtggcagtaatggaagcaactgctgattatgaaactatcaaaacaacgctagctgcggctgctaacgaacatggtgaaccgcactggctcgttgaacgccgtttagcggctttagatgcgatgcaaggcctagcggttcccaaagctgatcgctttagtattcgcgactggccactgacgcccaccgaccaaccactaaagttcagtcgttcggatcgaactttagcaactgatgtaacggccgaagctggtcatatccaaatcgtacaagttgggcagacaacggtgaccgtcaatttgcctgatgaactagatgatcaaggcgtcattttgaccgatatgttcacggcctttcgcgaacatccgcaactaactgaaaaacattttatggacaaagtcgtcaaaactgacgaggaccgattgaccagttaccataccgcgtttttgaacgccggggtcttcctctatgttcctaaaggggttactgtcaaagaaccaatcgagatcaccacgatccaggatagtacccgagtgcaaccgttaattagtcatgtcttgattgtggctgaacaagacagtcatttcgcagtaactcagcacctgacaacgaagggtgacgtcgataatatcgccaactgtgttgtagaaattttggcacgggctgacagtgaagtgcatttttcagcgttcgatgaactcggggccaacacgactgcttatttgaatcggcgggccgcaatcagtcggggagccaaagtcgattgggctatcgggatgatgaataatggtaacactttcggggactttgactcggaactgatcggtgaaggcgccaaatccgatgccaaggtcatcacagtgacgactaaggcccaggatgtctgcgttaatacgcgggtcactaaccgtggtaagaagactgacggcaatatcgtacaacgtggggtcattatggaaaagtctaacctgatttttaacggaatcggtcacattattcacggggcctccggtgcacatgctgaacaggaaaatcgggttttgatgatgtctgatgatgcccatggtgacgcgaacccgattctattgatcgatgaaaatgacgtgttagctggacatgcagcaagtgttggtcaaattgatcaaaatcaaatgtactatttgatgagtcgcgggattgataaaccacaggcccaacggttggttattcggggcttcttaagtaccgtgattggtgcgatcccatcgaagactgtccggactcgcttaacgaacacgattgaaaggaagcttgaagatggaatccaattttgagacgttacggtcagattttcccattctaaaccaacaagtgaatgatgaacgacttgtctacctggataatgcggcgactgctcagcgccccaaccaagtcgtggatgcgctcgttcacttttatcaacacgataatgccaatgttcatcgcggtgtgcacaccttagcagagcgggccactagtcaatacgaagctgcgcgcgccaaggtgcaacggttcatcaatgctgcaaaaacggatgaaatcgtcttcaccaaagggacgacggatagtctcaatctgattgccagtacttatggcgaagccaatattcaagcgggtgatgagatcgtcatttccattatggagcaccatagtaatttaattccgtggcaacagttagcattgcgtaagcacgccaccttgaaatatattgagttaacggcgactggtgaattggacatggccgatgctgccaacaagattacggatcgaacaaaaatcgtttcagtgacccatgctagtaatgtattgggaacggtcaatccaatcaaggcgttagcacgattggcgcatcaacacggtgccctgatgattgcggatggggcgcaagcagcccctcatatgccggtcgatgtccaggcactcgatgttgatttttacgcattttcggggcataaaatgctgggaccaaccggcattggcgttctatatggtcgtgagaatttattagctacgatgccaccgtatcaatttggtggtgagatgattggctttgttcaccgtgatgacagtacctgggcggaactaccgtggaagtttgaagcgggcactcagaacattgccggtgcgatcggcttgggcgcggcggttgattatttgacgcaactcggtatggatcaagttcagcaacacgaacagcaattagtcaattacttattgcctaagttgattgcaatgcctggtgtcacggtctacggtccccaagatccccaacatcatacgggcgtcatcgcctttaatatcgacggtttgcacccgcacgacgcggctaccgcgttggatatggaaggtgtcgccgttcgcgcgggtcatcactgtgcacaacccctgatggcagcgctcggcttagtagcaactgcacgggctagtttttacatttacaatacacaagcggacgctgatcaattattaacgtcactccaagcaacaaaggagtttttcgaacatgggactgtctaaattaagtggcttatatcgcgaagtgattttagatcatggtgatcatccgcatcataaaaatgcgttgccaaacgcaacacatgccattacgttgaaaaatccaacttgtggcgacgtcatcaatttggctattcaattggatgcgcatgatcaaatcgaagatattggatttacgggtgagggctgtaccatcagtcaagcatcggccagtatgatgacggatgcggtgatgggtaagtcgaaagaacaggcattggcaatggctaagacattttcggatatggcgattggcaagcaacacccgcaggccgatatggatgccttagaagacgccgcaattttatcgaatattatgcaatttccggcacgaatcaaatgtgccacgctagcttggtgggctttgcaacgggcattgcttgctgaaaatggcaatgaggaggaatcagaagtatgagtgaagtacctgacgtggtcaaaaatgaccgtgattatgaatatggatttcatgacgatgtcaaaccagcatattcaactgggcgaggattaacggaagccacggtgcgcgaaatttccgcggcaaaacatgagccacaatggatgttggattatcggttaaatgcctatcatgagtatttaaagatgccgatgcctaagtttggcccggatctcacgaaactcgacttgaaggacatgctgtattatcagaagatgaccgataaaaagttccgtgactggaaagaagtcccagctgacttgaagcggacgttcgaccggttaggtgtgcctgaagctgaacggaaatacttagccggttcatcggcgcagtatgaatctgaagtcgtttatcacaatatgcgtaaagattttgaaaagttaggtattatttttaccgataccgatacggcgcttcacgattatccagaactgttcaagaagtggtttgggaaactcgtcaaaccaaccgataacaagtttgcggctttaaacgcggcagtctggtcaggtgggtccttcatttatgtgcctaagggtgtccagacgaagacgccaattcagtcatatttccggttaaatgctgaaaactcgggtcagtttgagcggactttgattatcgtggaagatggtgccagtgtcgactatgtcgaagggtgtacggcccctaattattcttcagatagtttgcacgcggccgttgttgaagtcaatgttgagcccaacgcttactgccgttatacaacgattcaaaactggtctgacaatgtttatagcctggaaactaagcgagctgcagcggccgaaaatgccacgatggaatgggtcgatgggaatttaggttcgaaggttacgatgaagtacccaagcgtttatttgaatggggaaggtgcccgcgggaccatgttatcgatcgcggttgccagcaatggcatccaccaagattctggtgctcggatgattcataatgctaagaatacctccagttcgattgtttcgaagtccatcgctaagactggtggtgcgactgattaccgtggaaccgtgcgttttgccaagcattcagacggttccaaagcgcatgttgagtgtgatacgatcatcatggatgaccagtcgtcttccaacacgattccgtataatgaaatcgacagtgctaacgtcgcgatggaacacgaagctaaggtgtccaaaatctcagaagaacagctctactacttgatgagccgaggaatttcagaagctaaggcaaccgaaatgattatcatgggattcgtagaaccatttacgaagcaattaccgatggaatatgctgttgaattaaaccggttaatcagctttgagatggaaggttcaatcgggtagtaagggggattggttaagctgatgttaaaataaaacttgagtggcatgcgagattgcgattcgagttttttggttaaatgattgttgatgaatgttagccattataatcgtgccagctaggatggttgataattgtagtaatttaaaattgtatctcggttagtgtttttatcatgctgattcgccttttcgttaatattggcgacgtactttattataaattaggattattaacgtatattctaacaatggtataattaaaaacagttttaaacagacaggagtgtggcagaatggcagacgaacttggcgaggataaggccctctcacccgttgaagacgcggtcatgaagtcgttagagcaggtgattgatccagaactgggcgttgacatggttaaccttggtttgatctatggtgttgacgtagacgataatggtagctgcacggtaacgatgacgttgacgacgatggggtgcccattaggaaatttattggcaagtcaaattaatcaagcaattatgagtgtggatggtgttaagaattgtgaacttgacttggtctgggaacctgcttggggaattgataaaatgagtcgttttgctaaggttgcccttggcattcatggctaacgggtgagacaaggtggtgtgcgatggatattgaaaagtttattgcccggcgaaaagctttaaaaatttcacaagtcaaattatcaaacggaatttgtacgcaggcgactttaagtaagtttgaacggcgtgggcgagtaccagcattagcaattttaaatcagctctgcgctcgtctgggattgacagttgatgatctaagtgaaaaccaggctaattcagtgacccaaattcgacagcaacttgatgagattgagcgacgactgatgatggaagattatcaatcagtcctgcaatcattggtagacctgaaagttgagcaaattgatgcggtaccttcacggatgcaatattactatttatgtggcatgctaagttcgttgattaatggaacagccagtgatatttgtttttccttctcgcaaatcgttgatgatttggatagggctcaccaaacaattttcacaccgctagcttatgtcggtctgggtgtcatgtatggccggttagctgagcctgagaaagctcaattttatttcaggagagtacgatactatgtcgagcacgctggctcatcaggatatgcaaatgattacttacggctgttaaccctaatcttttatacggcagagtattacgcaattagtggtgatttcgtcacaagtaatcgtctaatagatgatggggtagcgctttgctcagatgaacatgtcacgtattacttaccaagattgaaatacttagcgaccgagaatgctgttaagcaacaactttcggataaattgattaagcggttaatgagtgaaacagaagcttttgcacggattaatcataatcaagttgttgaggttaaggtagctgcattgcgacaacgatatttgcagggtatttctgcttcagaaaacaattaacaagacaatggctagatttagtgttttattgtagtttccaacatgctaaaactaatcaatgctttgtacattaaataataagaagtcccacactagcaagtcaatactagtgtgggacttcttatttagaaagttatgtatgacgccgcccgcccctaaaaaatcttccccggatgtcccgcaaaaagtcctaccgattgaagttctattataaacgcttatggtgtcccattccggaaaatcctaatgtagcggtaatccattaaagacaatgattgaatggaattcacttagacataagaaattcttattaaattcacaggcacaaactattttaccttctttgactaatttgatagacttaagttaagaaagttgaggtgactgattgagatggctagtcataggcaaatgattgacaaactagtgtggtgttgttactagcgcagtccgcgttagtaacgatgcacaaactcaatttttaatcttaactcggaaaaagtaacgagtagtcaatttttaggtgaaagagggattttatgaacaattttcaaaatgacccacaaccacggaccatcaacacacaagttggcctccgtagtttcctaactaaaatgtatgggtttatgacaatcgccgtgttagtttcggcctttaccgtttacttagcgatgaccacgttccaagcacaaattaatgccgccttttcacaacacccattcatcttcttgatgatcttcattgtcagcatgtttgtgatgattggtgggattcaagtcaacgcgacacgcaatccagcgatgagcttcaccttactgatgctctttgccatcatctttggggttgaaatgtcagtgaccttgtccttatacacgggtgccgttatcaccggtgcgttcgttgcagctggagctgtatttgcgaccatggcggtgattgggacgacgactaagcgtgatatttcacgtattgggacgcacttgattgcagctttaatcgggttgtttgtcgcttcactggtcaatatgttcttacaaagtgccatgattagttacatcttttcatacattggtgtattgatcttcgccggcttatccatgtgggacgctaaccggatgcgcaacatgtatttacaatatggtgaccaggtttcatcgactggtttggccgttactggggccttacaattatacttggacttcgttaacttgttcctctacttcgtccaaatcttcggtggctcaagccgcgactaatcattaagataattattaaggattatgaccaagatgtcataatccttttaatttaccgaaaatgagttatttcacgggttttcggtggaccgaactcccgttttacttaattgtttggtacaattataagggtaaataattagtcgttcagcctgtactgacaggcgctgcgaatcagaccgtcaatcgagtggtattaatggtctgagtgacggattttcataaaaatgatgatttaaattaagagatggggagcaaactaatggcaaaaaaattattactgattgatggtaacagtgtggcatttcgggcgttctttgcgttgcatagtcaactggaacggttcgtaaatccagacggcctgcataccaacgccatttatggcttcaacacaatgcttgaccacatgatcaaggcagtcgaacccacggatatgttagtggcttttgatgcgggtaagaccacgtttcgaacagccatgtacgataattacaagggtggccgggctaagacgcccagtgagttttctgaacaaatgccgtatatcaaacagctattagacgcatatggtatcaaacattatgaattaaaagactacgaagccgatgacattattggtacactggccggtcaagcggatcaaaccggctacaccacgacggtcgtcactggtgaccgtgatttgacgcagttgacgaccgagcataccacggtggccgtgaccgttaaaggtgtttctgaagtggaacgctatacgccggcgcacgttgaagaaaagctgggcatcacaccggcacaaattattgatatgaaggggttgacaggtgatacctcggataactatccgggtgtcaccaaggttggtgagaagaccgcccttaaattactcaaacagtatggtacgatggaaggcatttatgaaaacatcgatgccatgaagcagagcaagatgaaggaacatctgattgaggatcgcgaacaagcggcgcaagctaaggtgctagcaacaatcaagcgggatgcgccgattgatgttcaattggctgatttatcctatgatggcccggatcttgaccagctggccgcgttttatcagaagatggactttcaatcatttttgaagaaattacacctacagtcggacgaaccagcaacgcccattgattataccgtcttgacgaaagctaacctgacggaattgcaacaatttaccgaccacgtggacttttacttggagatgccaacgccaaactaccacacgtcggcctttgctggctttgccatcggagcggatgatcactggtacatcagtcgggatgtggaattattaatgcaaccgactgtggctgacctcttgagtagcacaacgattaccaaggacgtttttgatatgaaacgcacgacggtcgggcttaatcgtttgggtattcagctaggtaaagtcgactttgatctcttactcgtttcatacttattagatacaaatgataacagtaacgacttgggaagtttagctgagcaacacgggtacactgacttgccgagtgacgagaccgtttatggtaagggcgttaagcgtgccattcctgaagatgatgacgtcttctttagtcatctcgcccggaaattggccgcaatcgctagtttgaagccacagttattaaaggaattggcagccaatgagcaggatcaactttacgatgatatcgaaaaaccgatggctaatgtcttagctcagatggaaatcgccggcattacggtcgacagcagtcgacttaaagccatgggcagtcagtttacagaacggttgagtgaaattgaacagacgatttatcaagaagccggtgaagagttcaatattaattcacctaagcaactaggtcacatcttgtttgaagaaatgaaattacccgtaatcaagaagaccaagacagggtattctaccgccgtagacgttctagaaaagttagcaccggaagcaccaatcgtcgctaatattttacaatatcggcagatctcgaagattcaatcgacctacgttatcggtttgttagatgccattcattctgctgatcaaaaagtgcatacgcgctacttgcaaacgttgacccaaactggccggttatcgtccgttgatccaaacttacaaaacattccggtgcgcttggaagaaggacgtaagattcgacaagcctttgttcctagtcatgaaggttggcagattttctcgtctgattattcgcaaatcgaattacgggttctcgcgcatattactgatgatgaaaatatgcaggccgcttttaaagcgggtgatgatattcatgccgcaacggccatgcgaatctttcatttgaactcagctgaagaggtgacgccaaatattcgacggcaagccaaggcggttaactttggaatcgtctatggaattagtgattacggcttgtcacaaaatatcggcattacgcgtaaacaggctcgcagctttattgacgcttacttcaaagaatatccgggtgtcaaaaagtatatggatgaaattgtccaaacggcgaaaaaacaaggttatgtggaaaccatttcacatcgacgccggtacttgccagatattaattccaagagcttcaaccaacgctcattcgctgaacggacagccatgaatacccccatccaagggagtgcggctgatattatcaagattgcgatgattaagatgcaagataagttacaggctgcgggtttgaaagcaaccatgctgttacaagttcatgatgaattgatttttgaagcgccaaaagaagaaattccagttttagaaaaattagtgccaagcgtgatggattccgccgtacagttagccgtaccgttaaaggttgagagccactacggtgatacttggtacgatgcaaaatagggggaaccaccatgcctgaattacctgaagttgaaactgttcgtcgcggcttaaatcgtctggttagcggggcaacgattgctagtatcgaggttttttggccgaaaattattaataatgatgtcgatagtttcaaacagcgtttagccaaccaaacgatccagaccattgatcggcgggggaagtatttgttgtttcgctttagcaatggtctgacgatggtgtcgcatttgcggatggaaggcaagtataatgttgtaccgcgtggtgaagatcaaggtaaacacacgcacgtgatcttccatctgaccgatgatcgtgatttgctgtacaacgatacgcgtaagttcgggcgaatgacgctcgtgccgaccggtgaagaaaacacggtggcgggattgcggacaattggcccggaacccgttgctgaacagttaacactggcttatatgacggccacttttggcaagtcgaaaaagatgatcaagccactattgttggatcaaagtaagattgcgggcattgggaatatttacgcggacgaaacgctatggatgagtaagattcatccaatgcggcctgctaattcactaactactgatgagattgcaacattgcgccaaaacattattgatgaaatggcgatggcaattaaaggtcacggcaccactgttcattcattttcaacggcatttggtgaagccggtcagtttcaaaatcacttacacgtctatggtcgtgaaggggaaccttgcgaacggtgtggcacaattattgagaaaatcaaagtggcacagcgagggacccatttttgcccgttagaacaacggttgtaggtgatcaagatgacaaagttgattggattgactggtggcattgccactggtaagtcgactgtttctaagctgctggcaactaagttaccaatcgttgatgcggataaaatcgcgtggcaggttgaagggccaggccaaccgacgacccaaaagattgtggcgcactttggtcagcaagcagtgctggcagacgggcgactgaatcggccatggcttggccagttggtttttaacgatgctcaagctttacaagacttaaccgcaattacacggttaccgattcagtacgcgatgttcgaagcgattgtcgcggcaaaccagcaacagcccgacgcaattattttagatgtgccgttgttatttgaaagtggctggcaacatgtttgtgatcaagtgttggttgtgacggcatcacccgccgtagtattgcagcggttgatggcgcgtaaccacttatcgcaacaggcggctcaggcacgaattgacagccaaatgccacttgcacagaaggtcgcaagggctgacgttgtcattgataacggggccaacattgataaaactaaagcagccgtgttaaaatggctgaaaactattactaaataaagaaaaactgattgttagttgttacaaggggtgagaagtctatgcaatgtccacattgtcatcataatggctcccgcgtggttgacagtcgaccaactgatgatggtcgcgtgattcgacggcgccgggaatgcgaaaactgtgggttccggttcacaacatttgaacgggtcgaagccacgccattattagtcattaagaaaaatggtgcccgcgaagaattcaatcgtgaaaaagtcttgcgcggaattattcgctcggccgagaaacgacccgttagcatggaaaccatgacgggcgtcgttgatgatgttgaaaataaggtccggtcactgggcgaaaatgaaatttcaagccaagttatcggcgagtatgtcatggagcaattggcagatattgacgaaatttcgtacattcgttttgccagtgtttaccggcaattcaaggatatgcacgtcttcttgaatgaactccaagatatgatggagcgtgataaggtcaaactggcaaaaccgtcagcgaagacgacccacgcacctaaacgaaaaaaagattagttaaaaagaatggtgaacaacatgccaaatgatgaacccttaacacccaaaactgggttagtggtcccgcaagcaccagcgctcagtgcggcgcaacaagctgtattggcggaattatacttgccactgatggggccattggcatatagcttgtacgcggcgttacgtagcttacagagtagcgagaatgagctgagcaatcgacgcagtcacgcggaactgctgggcatcctaaatgtggacttgccgacggtgttagcggctcggcgtaaacttgaagcaactggcttgttgcgcagctattatcaacaagatgaattgggtgccatgtacatttatcaattacaagcaccattactggcgttacaattctttgcggatgatctattgagtgtcctattgttagatacggtcggtgagttacgttatcaacaacttgctggcgattttgcagcacagccgattgacttgacggctgccaaagacgtgacggcaaatatcttagatgtgtttcacgttgatagtcaaaaagttacgacgccacctctttcagtgcaaaaggtgcgcgcccaattggcggccaatgaaccggccgaggatcactcgcccgtgctcagtgacgatgactttgactggcaactgttggggcaaattttgaagcagaactatgttgatctcaaacaggttgcgagttcacggcaactgatcattacggaaagtcgggtctacggcatcagtgagattgagatggctaagttaatcagtgaagtggctagtttaacaacgggtcagtttgatgaaaatcaattgaaattattgattgcgcggcgctatgaacggcccgcagtttcgagtcagcaggtcgctacggaagcaacggttgcaacgacgaccactaaggataacaaggcttcagcacagctctcaacggctgagcagcaactcgtgacgtatgctaagcagacagcgccgtatgactttttatcagctttgaagcaggagaaacatggttttgtgacgagcggtgagaaccgactagttcatgatttaattggtcggggggtattacccaatgccgtcatcaacatggtgatctactacttattgcaaaatcgggagttagctgcccttaatcgtaatttgctagaaacagtcgccaatgattggcaacaacacggcattacgacgccggaagcggctttgatgtatttgaagcaacgtaaacagccgaaatcaacaccaacacggcgcaagaacaatcgaccgacgcgtaaggagattatgccaaagtgggcccaacaacagcaacagactgagagtggtaagcaaccagctcagaccggtaaacaaattactgctgcccaacgcaaacagcttgctgatcgactagcaaagcttgagacaaattcggaaaaggaggactaaaacatggagaatatctcagaaacactccggacgttaatgaatcggaaaaacttgaatcatcggtatgaggcgttaatgacagctgtgtaccaagatccagatgttcgccagtttttagctgctcatcaaaacgaattatcttcggatgcgctagaacgttcagcggctaaattatatgaattttgtgaagagaaacgtaaaattgcgcggcacgagccaactcaagcacctgggtatcagccgacattagtgatgagtaatcacttgattgacattgcttatcagccaacaccacaaatgcaagaacagcaagctgctcacgcattgcaacagcgggttcgatcaatcagcatgccgaaaaatattcagacggcggacttaaagacgtatgatcaagatggtgaccgggcgacagcattaatggcagcacttgattttattgatgcctatacacaagcgcccaagcgttttcaccggggcttatatctctacggctcatttggtgtcggtaaaacttatttactcggtgggatggcgaacgcgttggcagctaagggtttcaatacgaccttgattcattttccgagttttgcggtcgagatgaagcgctcgattagtaacaatacgtcggcggataaggtcgatgcgattaaacgggcaccgattctcatgattgatgatatcggtgcggatgcttcgtcgacttggattcgggacgatgtgctcggggttattctggagtatcgaatgcaggaggaactgccaacttgtttctcgtctaatttttcgatgcaagaattgcaagatggttatttgacgctctcacaaaagggtgatgaagaaccagtcaaagcgcagcgaatcatgcaacgggtacgttaccttgcgagtgagattgagatggtcggtcgtaatcgacgactcaatcccgatgcttaaaatcaagagttgacttttagtttaaaagtggtttaatgaaaacagatgcaaaagacacgctttgtttaccatggattgcagagaccaagaccttgttctggaagtcttggaccgggtttacgaagataccacttttgtgaacatgctcaattgagccggaacgcttccgttattagcgctaatgagtcagtgtctttgatgacactgaaaaatcgggtggaaccacgtcaatgacgtccctaatgctagttcagtctggcattagggacttttttgtcgtcccggcgcggtgttttggtgagtgggtaaattttaaggagagtgtcaagtatatggcaagtattaatgttaagttcccagatggtgctgaaaagcaatttgatgccggcgtaacgacggaagcaattgcaaagtcaattagtccttcattggctaaacggtcggttgctggtaagttcaacgatcagatcgtggactatcgccaaccactgacaaccgatggtagtatcgaaattatcgctgctgatagtgaagacggcctcaatgttttacggcaaacggctgcccaagtattagctaacgcggttaaacaattattccctaacattcattttgggagtggtgaagggaatgccaacggtttcttctttgataccgacaatcctgacgaagacggtaaacaagtcagtgaagatgatttggaagccatcagtgataagatggctgcaattatcaaacaagatttaccaatcgaacgcgaagtcttatcaaaggctgacgctttagctttagttggtgacaacccttaccaacaagacttagttaacgaacgtgccgctgccaacaatgatcaagtcgttgtttacaagcaaggggacttcgttgatttatctgacggggcccaattagcttcaacggggaaagtcaaggtcttcaagttattatccgttgccggtgcatactggcaaggtaagtccagcaatccaatgttacaacggatctacgggacggccttcttaaagcaaaaagacttagatgctgacctcaagcggcgtcaagaagcccgcgaacgtgatcaccgggtcattggtaacgaattagacttattcttcgttgatcctaaggtcgggaatggcttgccttactggatgccaaatggtgcaacgattcgtcgccaaatcgaacgttacattatcgacaaggaagttgcaaatggctaccaacatgtatacacgccagttttagctaacttggacgtttacaagcaatctggtcactgggaccactaccgtgaggacatgttcccaccaatggacatgggtgacggcgaacaattggaattacggccgatgaactgcccatcacatatccagatttacaaccatcacattcgctcataccgtgaattaccattgcggatcgctgaactcggcatgatgcaccgttacgaaaagtctggcgccttaactggattatcacgggttcgtgaaatgactttgaacgatggtcataccttcgttgcgttggatcaaattgaagaagaattcaaaaagatcttgagtttgatggttgaagtatacgaagactttgacatttctgattaccggttccgtttgagctaccgtgatcctgaaaacaaggaaaagtacttcgatgatgacgctatgtgggaacgcagtcaaaagatgttgaagtccgctatggatgatatgggcttggattacttcgaagctgaaggtgaagctgctttctatggtcctaagttggatgttcaaactaagacggcccttggtggtgaagaaaccttatcaactatccaattggacttcttgttaccagaacgctttgacttgaagtacgttggtgctgatggtgaagaacatcgtccagttatgattcaccgtggtcttgtttcaacgatggaacggttcgtcgcttacttaactgaaatttacaagggtgctttcccaacctggttagcacctaagcaagtaacaatcatcccagttaacaatggtgcgcacggtgcctacgctgaaaccgttcgtcgtcgtttggcagctgaaggtgttcgggtaagtatcgatgaccgtaacgaaaagatgggttacaagattcgcgaatcacaaacgaagaaggttccatacttgttagttgtcggtgatcaagaagttgctaacgggagtgtttcagttcggaagtacggtgaagaacggactgaatccgaagccgttgacatgttcattggtgccatcacgcaagaaatcaagcattacagtcgtggtgcaagcaaataattaacagccaatggcatcaatattgattgatgggttgacaagggccgtggttcttgttaatatattggagttgagaaaaaaagcagaagcacccgcttctcgccttggtgaccagagtcatcgggcagatgaacgatgaattgattcccattaacggggttgagcgggcgtactatgcgcccgctctttttgtgaatttctctaaaatatttcggaggtgaattaccatagctaaagattcaatggttaatgacggcatccgtgctcgcgaagtacgtttgatcgccagcgatggtgaacaattaggtgtcaagtcacgacaagaagcaatgcagattgctgaagacgctagtttagatctagtattggttgcgccgaaagcgaaaccacccgtggccagaattatggattatgggaagtaccgtttcgagcaacaaaagaaggatcgggaagcccgtaagaagcaaaaagtggtcagcatcaaagaggtccgcttgagcccagctatcgacaccaatgactttaacacgaagctgaaacatgctgaaaagttcttgtcaaaaggtgacaaggttcgcgtctccatccggtttaagggccgcgctattacccataaggatattggtcggcaagtcttaaatcgaatgattgaagctactaaggaattttctacggtcgaagcctatcctaagatggatggtcggagtatgttcctagtactagcaccaaaaacagataagtaatttctaggaggattattgattatgccaaaacaaaagacaaaccgcgctgctgcaaagcgtttcaaggtaactgctaagggtaagattaagagcgccaacgcttttactagtcatcgtttccatggtaagactaagaaacaacgtcgccaattacgtggtacggctattatcgaaaagccaatggtcaagacataccacaagttattacaaaaataattcacaacgttttagttaaatctaggaggaaataacatggctcgagtaaaaggtggaactgtaacacgtaaacgtcgcaaacggattttaaaattagctaaaggttaccgtggtgctaagcacatccaatttaaggttgctaaggaccaagtaatgaagtcatacctatacgccttccgcgatcgtcgccggcgtaagagtgacttccgtcgtctttggattgcccggatcaacgcggcagcccggattaacgacatcagctacagtcaattaatgcacggtttaaagttagctaacgttgacgttaaccgtaagatgttagctgatttagctgttaacgatgctgatgctttcaaggcattggttgacactgctaaaaaggcacttgcttaatttaaaacttaattagggcttgctctaatgtttgaacgaccgtcatcctgtatgggtggcggccgtttttttgacgcttgattaagggaacacgattcctggacaagatggttcggtgtgttgacgtccttactgaatcttgagattgatttgacacattattgtgatatagtaacgatgtaagcgcttacttatgtgttgattaattatttggctgggagctttggagaaggggtgtcatcatggcaacagttttacctaaagcagttaaggtctggatgggcgccaacatcttgcagattgagtttgataatggggagtttcgatacatgcgtacacatttcattgatgactatgtttctgcgtggtcaccaaaaaagggtaaggggaagcggcgcaatttgtggttaatgccatcttgggaatggttgggtgccaatgctcggattgaaccggatggcactgtcgtgttgttcgaaaaggatgtttatacggcccaagaactttggcataatagtgtgacgcgaattgacttggtctctggcgtgcactgattcataaaagatgatgccaaataaaaatggacttggtcatttgactgagtccattttttgatgccgcttggagtatacgtggataacggcctaagtgagccatttagtgcgcgactctgatttatgaaaatcgagtgtgatttctgattggttaagccagtctgccattgtctattcgtgataatcttcgttataaataaagcgatgcagttttaggtattgtgcaccgagtttgcgttcattttcattatctttagggtaataataacgacgaccagccaatcctttaggcatgtagttttgttgggcaatctgatgtggcatttggaatggattatcgatcagaccaccacctgtaattttctcggagtgtttgtagtgcatatcgcgcaatccacggggcatggggtgctgacttggattttgtgtgtcctggtctagtttttcccaagattggtcaaacgaaccagacttgggtgaaatgcacatcagcatggtggcaaacattagtggatattttgctttgggcatgccaatcttttcggcttgattggcagcgaccacaatttgtgtgacctgttccgggttagctaagccgatataagtgtatggaatttcacgtagccggcggaccactgagggtaagtcatcattttttaacaaaatggttaagtagtagagcgccgcgtcagtatctgagccagccatcgaatccgaataagccgacagatagtcataatgcttagttgccttccggtcgtagctaaaatgctgttgctgggcaaagtgttgtaccgcagcaacagtgatttgcttctggtcaatagcgtggagcgtttccaagatatttaacgcaattcgcagatccccttcggccgaaatagcgatcaggttgagggctttagcatccacctgatcgtcggttaggttgtaaatgtcggttaccgcacggcgtaaagcaatctcgatatctgtatcgctcagtggttgaaactcaaaaatttgacagcgcgaacgaatggccggaacgattgacataatcggattttcggtcgttgagccaattagcatcacgtgcccattctctaagtagggcaacaaaaaatcctgcaatgttttagtcattcggtgaatttcgtcaattaatagaacaaacgattgctctgggtattgtgcgatggctttcgtcagctgtgccttattttcggtcgaagcagtaaaagccacgaatggataatcgtcttgactcgcaataatctgcgccaaactagttttgccagttcccggcggcccccacagaatgaggggaatattaacatgttgatcaataatctggcgtaatggctggcctgccttcaacagatcctgttgcccgaccatctgttccagtgattgcgggcgcatttgatcagccagtggtgttttaaatgccaatttcaaagtcctttctgattaagtgttttagtcaaattgatgctatcatcatagcactaatattttggaaactgaaaaagaaagtttggcaggttagcggggaacgatgctgaaatgagtgagtctgataccataggtttgacgttggctcgagtgatgggttgaaggcgtattgatttaagttttcatgcttgttgatgaatgagaaaggcgatattgtttcgtagatggtattgagtcagcttggggagattaatagcttggaattaccccccgtgtatacggaaaacagattaaacgaatcccggggagtgcaacatcagttgtaagcactaaaagacagaaaaggacagcgtatttggcgagttaaagttgatcattatcgcgcgagccgtaatacccgtcaactcatttccatccttcaataactaccttgccaatcatatgatgttgctcgataagttgatgggcctgccgcaagttaagcgcgttgattggccgtagtgtctgcgatagcgtgctttgaagcaagccacggtcaagtaaatccgcaatggtttctaagatatcgtgctgactaatcatgtcggccgtgtggtagtaggattttgagtacatccattcccaagcaaatgtcccgcgtttcttggttagttttttaaggtcgattggacgccgattttcggtaattgatgcgatgtggccaccgggtttaatgagcgtacatatctcattccagtgactgtcaagatcgcttaatccgaggatgtaatcgacatctttaatacctaaagcatgtacttcactaaccaaatcatgatgatgatcgacgactaaatcggcgccgtgttgctgcgtccaagcgatactttcaggtcgtgaagcactactaataactgtgagtcccgctaattttgctaactgagtagcaattgaaccgacaccaccagcgccattgatgatgagaatggtttgattgcatttttcggaattaggtttagctgggtcaaaaggaatgtgaagttgttcaaataatgcctcgtatgcggtcagcgaagtaagtggcatggccgcacgggcagcggttgttaatgtcgcgggggcgtgaccgacaaggcgttcatcaaccaggtgataagcactgtcgcagccgggacgtctaaatgagccagcataaaagacgtggtcgccgggttgaaacagggtgacagcttctccaacagcggtcacaataccagtggcgtcccaaccgaggatcttgggtcgcatgaggtgctcatgccccgttttacgaacgctaacgtcaacaggattgacagcgacggcttgaacttgaacaagtaagtcatgaccttgagcgctaggttttgaaatcgtcacgtctcgtagactagcaggatcttcaataggtaagtggtcggtaaaaccaattgcatgcattattaatcaaacccctttcatgacattactataggttaccagtgaggaataaacaagacgtgaattatttgccacatagggacatatttgtcacgcctattagtccggtctgacggcaaagttgtgctacaatcaagacacttaattaaggtaggggaagttagatgcagcgacaagtatacgattgtacgccgggttgtccggttgaaagtaccttgcaagttattgccggcaagtggaagagcgtgattttgtatcatttatttacggcaggaacatgccggttcagcattttgcaaaaacgactgccgggttgttcgcggcggatgctagctcgccagttacaagaattggttcaagacggggtgattgcaaaacgagtttatccggtcgtgccaccgaaaacggagtattggatcacgccatttggtcagaccttgaaaccggtgattatggctatggagacgtggggccgacagtataattcagtgaatggaaaacctcgtcaataggaatgtgagaacgggcatagtgtgagtttcaaggaattgttgtcggttttgttaggggcgattgtgcttggtgccttgctcgcattaatagtgactgtttaactaggctagtaaagaattgatgtgattttttactagcctagttgttttctaatctaataaaacgggagtctgatgtaaaaagtacaccgatagatcactgtttggcagcatttcttgaataatcatgggtttgcagtaagcaatgataccgtattaagtctgagataggttgtggattagttgcttgttaggaggtgcatgttagataattattaacaacttaatgaagtgcagcatggccgtgaatctcgttcgctaaatgggggtgccattatgaaaaattgctttggaatcattggtgggatgggaacaatggcgacggaggactttgtgcataccgtgaaccggctgaccgttacccatcgtgaccaggattatttaaactacgtcattttaaatgatgctgagataccagatcgcaccgcatatattttggatcataactgtgccaacccgttaccatcattggaagcggatgtgcagctacttaatcaattaggggtcatgtttattgtgatgacgtgtaacacagcacattacttcattcccgcattgacggcgctttctaacgtgccaattttgaatatgccggccttagcggtaacagcagcctgtcgatcacagcaaccgcgaccgttacgaatcggtattttagcgacaacgggaacactagagtcgcaactttatcaacaacttattcggtctaatggacatattcctgtgatacccaataagcagcagcaagctcaagtgatgaccttaatttatgacgacatcaagcaacgtgattttgtagatcgggtcaaatttcatggcttaattgatcaattattgaatgctgctgattgtgacgccgtcattctcggctgcaccgaattgtcggtggctcaggatgctgcgccatatgattctgaacgaattattgacgcacagtatgaactagctcgagcaaccgtccaacgcgcacaggcaactaagccagcgttgatacttcgtcggcggccatcgattaggcggtaggagggtgcaggtaactggataaaaatgatttttgatctatttagtacgtgtgattgtagctgttataacaccactttcgtatacatgaagaatagtaaaattgtaagcgctcaaatcgttgctaactagcctattctcgcacatgcaaggttgggtccgtctccacacagtcccgcacaacaaaaaagcgagccttcaattgaaggctcgctttgtgttctcgattattcagtgtggtgcttccgaactgggctgacccaggtgccgctgccgtaacccaggatggttttaacggctggaatcagcgtagtgaccagagcgagggcgttaacctgccagtaaatcagcatgtagagtggcatgaaaatcagatatttaaacttgcggccacggtcgtcaacgatcaatgcggacaatagctgcaagacgccggcgaacatttcgaaggtcacgaagatgaaggccatgcagaacatatgatagacgcgctcgtaattgccagtaaagaagaaggtgacgagcgagatcaggaagatcagtgttgagacaaagaagaatagggaccagatgatgctcagtgtttgatcagtaataaaagcccattgcttcaaatacttaccgggatgactgacaacccgtttaaagttggtcaacagcacttcggtaccacctttggcccaacgtttgcgttgatgataaagggcgtctagattctcggggacgttcatatagaatagaatgtctggcgagaaaacggtcgtccaaccattcaactggtgatcccaagcaatactgatatcttcggtcgcgcgatcttgccggaataagccgacgtcaatcagagcgtcacgacggtacattgtattggcaccactataggcatacatgttacctaaagcactgacttggctccgcttgataacaccaacgatacttgaaaattctacggtttgcgacttagcgatgatcgtgcttcggttctgaacgtccatgttggccgtgaccgctgccgtattggcgtgttcttcgcccatgaagtaactcatatatttccacagtgcatcgggttctggaatggaatcagcgtcattacttaaaatgaattcaccacgggcaaagccgacaccgacgttgaacgcgtgggccttaccctgatttttcttgattgttaccacgcgtaggttgtcgtacacgctctggagacgttctaaaatagctggggtctcatcagtcgaaccatcgtctgtgaccagcacttcatatttttcataatttaaattgttcattaaatagttgattgtgtgttcaatcatgacttcttcgttatgcgctggaatcatgatcgtgataaagggttgttcttcaggcgttagcggttgaaattcaatatcgtctttgtggcgatgacggtaaatcagctggtagcagagaacgccgataaaccaggcaaacgcaccgagaatcgggtaggagactaataataatagaacaaagttccagatactttcgaagggcttaagtgtttgcattatttccattggctagtcctcatacaatcagtggatttcgttaacatcgagattttgttcggggtcaaccgtgtagtgcttgacgtgttgccggaaagtggcctgcccgaatcgttgggtataaaagttatttagttgccgcttccgaatatctaacaggtcttcgttgtattgccgttctttactgatatgctgcttgacccggtgattattgtgaatcgtggagacaatgaccacaatggcgattaagataaacgcaataataaagaaccggtcaaaaaagtagaacagcgtcttaccttcttcgtatttccaggcgtgaatgaactggggattattcgcaagtaacgttgacgagatagtccagtagacaggtacggcaacgcagatccaagtaataattgcgactagggtttgccaaagtttcgtccaccagtgccccttggaaaaatatttatcggtaacgtattgtttcataacatcttttttctccataaacgaacctccgagatgacatattgtttagtgatcgtgcggatcatatagtttatatcattactgatattgtcagtttatcgacatagaacaacaccagggtgcctaacattaactgcgatgaacagttttagaacaatctgaacatttaaccatgtcaataagcttacatgaggattgcattgatgtgcaatcaatatacatatcagtatcatgatataagtaaaagccacgtatctttaattaatatacacttaatgggatactttgttaatctaatttgacaaaacggtcagtgcgccgattgaatgtcagattgtggtttagccattgcaaataaactggcgagaaaagggcaaccggcaaaacagcgctgaatttactggcgacttttagtgctattttcaatgtcttactcgggccccaacctatcaaataaatgcgggtgcgatcaacttagtcaaatttgatccaggtggtgtcatcaagttacgacaacttggaaggattttcgttgcttattttcaaaaaacaaattattatataatgatgactaaaatttagcacaattgcctagtgaactccggctccagacctgatttagtccggtatttcaccaatagtatgataaaatgggctagtggggttatgccaataaccaaaaaatccagtgagaagcgaaggggataacgatgattaagcaatttaaaccaacttggatgataccagcaatctacaatgtgacaccggcgcagttacgagcgcagggcattaaggcggtatttaccgaccttgataacacgttgatcgcatgggacaatccggatggcaccccggaactgaaaaagtggctgcacgcgttacaagacgcgggcattccgttagtggtggtgtcgaacaattccgaagcgcgaattgctaaggcgctgcaaagcctggaactgccatttgtttcgcggtcactgaaaccactaccgctggggatcagtaaggcgcgtcatgacctgggcttacacaaaaatgaagtggtcatggttggcgatcagtatatcaccgacatgtgggcggcccatcttgcgggcgtgcccagtatcttagtacagccaatcgtgaagacggacgcgtggaatacccggataaaccgtttctttgaacgatttatcaaattacgattagcacatgtttatccagaaatgcattttcaggaggaccttaataagtgagtgaaacatcagaagaaactttatactgtattgggtgtggtgcggcgattcaaacgaccgatcctaaggcggccggctacacaccgaacagtgcgttacaaaaatcattagctagtgacgcacaggatttatactgtcaacgttgttttcggcttcggcactataacgaaatcgtgccggttggcttaacggatgatgattttcgtcatttgttagccacgattagagatgcgaacgcactggttgtgtacgttgtcgacatttttgatttgaatggaagcatcattcctggtctccagcgctttgttggagataatcccgttttgttagtcggtaataaggaagacgtgttgccacgtcagttacgccggacgaaattgcgggaatggatgaatcaacaagttcgtgcacagggaatcaaaccggttgacgttgcgttaacgagtgccaagaaggggcattccattgatgagctcttggcgatgattgaaaaatatcgtcgtggccgcgatgtttatgtcgtaggggtcacgaacgttggtaagtcaacgttgatcaatcggattattgccaataatactggtttgaaggacttgatcacgacatcccggttcccagggaccacgttagacaagattgaaattccgttggatgatggtcatatgatggttgatacacccggaattattcatcctgaacagatggcccacgtgttatcaggcgatgacctgaagttagtctcaccacaacgcgagattcgcccaaagggtttccaattaggcaacggtcaaactttgttcttaggtggggtggcacggttagatattgttgatacgttaaaagcaactgggacggtctacgttgataataacttgaccttgcaccgaacccggaccgagaatgcggacaacttttataccaagcatgtgggtgaactgattacccccccaactggcgatgctgtcgctgactttccaccattagttcgccacgaattcaaagtgacggaaatcagtgatattgtctttgaaggcctcggatgggtcacggtggctgcggatacgcgtgtagcggcctgggcaccaaagggtgttgcagtcttgacgcgcccagctatgatcaacaagcgttgatgagttgtggtcggagtagaatctgattcgcgattatcaaacagaaaattataggagtaaatcaaacttaatggaaaacttacgtggaaaacaaaaacactatttacgtggtgaagcccaccacatgcggccactatttgctgtcgggaaaaacggcttgactgacgaatggttgacccaattaacgggtgcgctggataagcgagaattaattaaagtcaacattttacaaaatgctgatgtgacaacggctgaagttaaagctgcaattgaacagaaaaccgcgattacggtcgttcaaacaattggccgggtgttagtcttatacttgccagctagtcatgaagaagaccagcactattcattggaagttgctaagttataggaggaatgacgggtgcagacggttaatcaaacagcgacaaaagttctgacggaaacggtgacggcaattccgcatcgccgtgttggtattttaggtggcacgtttaacccaccgcatttgggacatttgatcatggcccagcaagttggtgatcaactgggtttggatgaagttcgctttatgccggacgctcaaccaccgcatgtcgacgaaaagaagacgattgcggtggaagatcgtgcgaatatggtccaagaagccattgttgataatccactatttcggttggagacggcggaaatcgagcggggtggcaaaagctatacttacgaaacgatgaagtttttgaaagctaagcatccggacacgcagtactatttcatcattggcggcgacatggtcgattatttgcatacttggtatcacattgacgagctagttaaattagtcacctttgttggtatcaaacgcaccgggtacccaacgacgagtcaatatccggttatttgggtcgacgcaccgttgatcgatattagttccactcagattcgtcaaaaaatcagccatgggcattcggtccgttatctggttccggaagccgtggccgcttatattaaggagcatcatttgtatgagcaaaacgattgagtatactgaagcgattgttccatatcgtcacgaggagctaatggcaaaagttgccgcccagttgactgacaaacgctatcaacactgcttacgggtcgaggagactgcgcggcagttagctgctgacaacggtgttgatgtcgagttagctggaattgcggggttattacacgactacgccaagcaacgcgatgatcaaacatttattcagctcattaagacgcatggcatggaccccaacctggtttcgtatgggaacggggtctggcatggctatgttggcgctgaactgatcaaagatgagttgcacatctacaatgagccaattttgaatgcggtgcggttacacacggtcggtgcgccttatatgactaaactggaccaaatcatcttcatggccgattttattgaaccagcccgggacttccccggtgttgaagcggctcgtgaagcgacggccaagtcgttggctgacggtgttcgtttccagattcaacatacactagattatctgattcagaagggtgcgccagtctacccacaaacgttagcaacctataacgcgtgggtcggcggtgtggcccctcaatttgccaattaaatttaagggagagttttatggatagcaaggaacttttacaattaactgttgaggccgctgacgataagcgtgccgacgatatcgtggccttagacgtcgcggaagtcagtttgatggcggactattttgtcatcttatccgcggattccaagcgccaagttcaagcgattgctgataatatcgtggactttgtgcgcaaggccggttcggacgttaagagcgtcgaaggtcggactgcgggcgaatgggtcttgatcgatgccggtgacgtcatcgtgcacgtcttccaaaaggatgcgcgggcacactataatttggaaaaattatggtctgatgcgcccatcgtcgacgttgcacaatgggtaaacgcatgatttatcagacgtttgccgaactttatgacgaactttttgatccagccatgtaccagcaatggctggattttgtccgtcgtgagtatcctaaccaagatggtcagttgctcgaattagcttgtgggacgggacgcttaggggtgttgttagcccaagccggctatcaggtcaccggtttagatttgtcggagaacatgttagcactggcacagcgccatgcggacgaggcagccgtgaccttaccgctattacaaggggatatgctcgatttatctgaagttgggacctttgatgcggttacctgttttgctgattcgttctgctatttgcccgatattacgacagtccaacgtgcatttgaacaagtggctcaacatttgacagcggccggcgaatttttattcgacgtcattacaccttatcagacggatgaggtctatcctggttatatgtacaattatcgcgatgaggatcgggcttttatgtggacaagctatgccggtgaacagccgcacagtgctgagcacgatttaacgttctttatttataatgatgataagcaggccttcgacgaggtcagtgaattacatcaagaacaaacttatgtgttggctgattatcaacaagctctgcaggcagccggttttaatcatgtcacggtcagcgccgattttggccgccaacaaccggatgatcagaccacgcggtggttcttcaagtgtcgtaagtagtaggaggaacaagaatgcaagcagtcgggttaataactgaatacaatccgttgcataatgggcatcgctaccatttgcggcaagcacaacagttgaccaatgccgactgtgttattgttgtgatgagtggtgattggctgcaacgcggtgaaccggccattttagacaagtggacacgtgcgaagctggctttggaaaatggggcggatctagtaattgaactgcccgtgttttttgcgacccaacctgcccatttatttgcacggggtggtattgaactactcagtgcactggactgtacgagtgttgtttttggtgcggaacatcctgagctggactttcaacggttggccacggcaattgcggcgcaacagggcgactttacccattataatgagacttttgccactcagtttaacgcggccttgcaagctgccacgggcgtgacgttgacggcagccaatgatatgctgagcttctgttattacgctgccaatcagaccctggcacatccgatgcagttactgccgatcaagcgtcgccaagcggatcacgcgacgacgacaattgcggccgatagtcgctacgccagtgggacagcggtgcgccaagcggcacttgcacaggattgggcggcgctgaaaccagttgtcccggccgacacgttcacggcgctgactacgcaacgactgcagcgctggagcgacttttggccgtttttacagtatcaattgctgaccgttgacgttgcccgtagtggacagtatgatcagatggcggaaggcttggaataccggatgcaggcgatggcccaacacgccacgacttttgatgactttattcatcaggtcaagtcaaaacgctatacgtatacacgattgcagcgggtggcgacagccgcactactacaacttactcaggcagaagtccagaaagcacaggcacataattatctgcgcgtcttaggcttcacacctaaggggcaggcttatttgcatcaagtgaagaaacagctcccgttgccgctgtatacgaaaatcaatcaagacttacgccagcatgctctgaatctcgattatcgggcggggcgcgtctatcaattaattaatgggcaatcgcaagatttatatcgacaaccatggcggttaccggtaacaattggttgaccgcggcgggctttcttgatatggttaggtctaatgacgggcattttggactgtcaaggaaaaaacattgacaaaggatttttacacaggtataatttatcacgttgcattaggaggtttttaaatgaaatggtcactttcacagcttaaaacataccgtgaaacgccacttcagtttgatgaagcattggatttaaaacactccttgatgagccgttatccagaaattatcgatgttaagtcagttcacgcaactgggttagcgagttatgataaggataatgtgttaatcacggcgaagattgacgcaatgttaacattgccgtctagtcgctcgctgacgccagtggatgtcccattggcttttcaaatgacggaatattatgttcctcagggaaccgatctgagtcgttttgacgaagaaactgatacggtaattattttacctgaagatgatattttagattttgatgtcgctgtggaggataatattttaattcacatccccatgcagattctttctgaagctgaacaagacggcgccccgatgccaactggtaagggctgggaagttctctccgaggacgaccaagcgttgcaagctgcagaacttaaaactgttgatccgcgtttagctaagttaaaaaacctgttccctgatcaggaagacaaggattaagttagctaggcgtatcaaaacacacattatgtgaattcacttgaaggaggtgtaggttgatggctgtaccagcaagaagaacatctaagatgcgtaaacgcaaccgtcgtggtcatattaaattggctacaccaaatttggcaccatgcccaaattgtggcgaattacgtgtatcacaccgtgtttgcccaagttgtggatactacaacggcaagcaagtcgtaaaagtaaacaactaattgttagttggtgaaaagttgcattgcggccatggcgcatggaacttttcgttaccataatacgatcaaaaagcccgcttaggtgggctttttttgttgtcttcaattaagtttgagtcgggaccagcacttcttgaaataaggtttgactgagctgccagcgcggtcaagcgagtggccttgcatattgattgcgatgaggcgtctcccttccgtatactaagactatcaaataatgggtacggcttcataataagtgttactgacgcagcgacaagggggttatggagatgatgagcaaaaaatatgggatcgggttagcactgctcaccgtggttctgttagctggatgtggcacccaacagtcgacgcaaaataaggcgacaagccaatcaactagcagccaaagtaattcgaccaaaagtgtgacagccaaaacgaaagtgtcattagccgcagccatcaaaaagtttcagcaacaatatccggacgccagtgtgacgagtattgagttagaagaccaactcggtcgaccggtttacacgctggaaggcgttggcggcacccaagaacatgaattacaactcaatgggcgaaccgggaaggtcatcagtaagcagtctgagatgctggatcaagatgatcaagctgacgctgagggtgaccggctgaatcttaacaaggtaatcagtcctagtaaagcggtggcgattgccatccatgatcgtaacggtggctatgctagcgaactcaagctcgataaggacaatggcaccacttactgggaggtccaggtacatcaaggaaagcagcaagtcgatattaagattgatgcctatgaaggtcatattttggaaactgagcacgacgattagtaccacgtggttgctggtgaaaaggggcggtatgtagcctcattttgtcagcaactagtcttgaaatggtcagccggctaaacgtatcgcctattttgtaaatcactgatttgatcaatagctagtcgtaatcatcacgtccgtttccatcacaccgaattcttgccacatgatttgattgatggtttcaatcagacgtgtgatttcaatcgccgtcatccgaggtggcacaacgatcgtggctcgcagcatgatgagattaccatcataatgagccttgagaaaaatgactttgcggacactagttaaatcagcaattcgccgttgatagcgaccttcaaggtaagggtcgaaatagtcaactaggttcagactactttctcgaaaaattttggtgccagtattgaggatgtatagccctaagccgatactaatcaggttatcgaaccactgaaggtggagcttgaccgtgacaaggatcgtaagaacggtagtcagactggtcaacgcgtccgtgaaggtatcacggctcgctgcggtcagggcagcattgttaagtttgcgactccaataatgattgaaggcccataagaccagtagcaccacgaaggaaaacccggcggccaagccggcgatactgctgaggtttttgaagggggtacgggtggcgaatgtcattacgcctttgataataatgtcgattccaatggcagccatgatggtgccggctagtaaattaaaaatcgtctcaaaacgaaagcgggattgctggattcggggtcctaattgctgctgctccgtgggtgcgatgggtgcgacaaataaatcgtcatcgtgcgtgcgactggcgatgaatagaccagtcatgagtagcccggtcgaaaaaattccagataaattattaaaggcatccgcacgtagggcctgtgagtggccccagcgtgcccctagaagctcgataataaataagcccaaataaacggccacgttgccccagagatggtgacgggccgttttaagcgaaataacaacgggttgttcaatttgatgccaatctggcagtcgttggatagacatgattaggggcctccttacttatcttgaattggactgctggtcaggattagtggtgctagggtgtctctctggtaaaagtggccaccagcgggcatgtacgaataaaaaaagtgcggaacgtcataataacaatgaggacactagcctaaacaccacgaaccgatctatgaaggttatccgtttattttactgtaagcctagcacggtgtttttaactttgtcagttggtgctgtttgaaaagcaagtaaccttgttggatggttctatgaaaattaatttcttcccgcgataaattatatgaaattaattttaaaatttgcggtcatttactttattaacagcgtgttttttggtacgatagttgcgtattaaaaattgggaggcaataaactaatgagtaatgaaaaaccacaaattggtgtcattgggatggccgtcatgggtaagaacctggcgttgaacatcgaaagccgcggctacaaggttgcgatttttaatcggactggtgccaaaactgaaaaggtcgttaaggaccatgctgacaagcaattagtaccaagttataagatcgaagacttcgtggcttcacttgaaacgccacgacggattatcatgatggttaaggctggtaagccaaccgatgccgttatcgatgaattattaccactattagataaaggcgacgtcttgattgatggtgggaacaccaactttaatgacacgatggcgcgtaacgcccgcttagataaatccggaatcaactttattggtatgggtgtttccggtggtgaattaggtgccttacaaggcccttcattgatgcctggtggtcaaaaggaagcttatgatttagttgccccaatcttggaaaagatttctgctaaagcgcctcaagacggtgcaccatgtgtgacttacatcggcccgaacggtgctggtcactacgttaagatggtccacaacgggattgaatacggtgatgaagagttaatcgatgaatcatacaatatcatgcgcaacgtcgcgggcttgtccgttgatgaaatgtccgatatttttacggactggaacaaaggcgaattgagcagttacttgatcgaaatcaccgctgacattttgtcacgtaaggatgatttaggtgcggataagactaagccaatcgttgacatgatcttagaccgtgggaacaacaaaggaactggtaagtggagttccgaagatgccttgaacgttcaagtgccacaatccgttattacggaagcggtctatgcgcgttacatctcaatgatgaagaacgaacgggttgccgcttctaagaaattagctggcccaaccgctgacgttgacttgccagccaagaaagaattggttgagaagattcgtcaagccctctacttcagtaagattatgagttatgcgcaaggcttcgaacaacttcgtttcgcttctgaacattatggttgggacttgaagttcggtgaacttgcccaaatctggcgtgctggttgtatcatccgggcccaattcttacaaaacatcacggatgcttttgataagaagcctgatttaaataacttattgatggacgactactttgccgacatcgccgccaagtatcaacaatcaacacgtgaagtgcttagcttagcaatccaagctggtgtaccggtaccatcatttagtgcggcattgtcatactacgactcataccgggccgaagtgttacctgctaacttgttgcaagcgcaacgggactactttggtgcgcatacgtatgaacggactgaccgtgaagggttataccattacagttggtacgaagaacaataaaatcattttgaatgaactaaactgtgtctaatgacgttacgcgtgattaggcgcagtttttttgtgctgtgggtggctgtgcggtaatgatcgttggtttgagtggattagaacgtacgtttgcgttaaaattgagagtaatgaataaacgcgaaagtgggggtcgccatgcgacaagaatcattatttaacccggataaatctagtagtagtccgttggcttaccgggtccggccagtgacgctggcggatttcaagggccaagagcatctacttggcccgggtaaactattacgacaattaatcgcagaagatcagttaccatccctgattttttggggaccaccgggagtcggtaagaccacgctggccgaaattattgcgcaacagacccagtcgcactttattacgtttagcgcggtgacgagtggcattaaagaaattcggcaaatcatggatgaagcggaggctaatcgagattttggtgaaaagaccattgtttttattgatgaaattcaccggtttaataaagcccaacaagatgcctttttgccatatgttgagcgcggcagtatcacgttaattggtgcgacgacggaaaatccctcatttgaaattaacgcggccctattatcacggtgcaaagtattggtcttaaaggcattgacgcctgatgcattagaagctgtcttacagggcgctttgcagaatccgaaggggtttccggatcttgagattacgatgcagcctgatacactacggttgatcgcagaatttgctaatggtgatgctcgtatggcgctcaatacgttagaaatggctgttttgaacggtgaccgcgatggcaagcacgttacgattactacggccgggttatcgcaactgatcaatactaagtcgttgcgctacgataagcatggcgaggagcattataatattatctccgcgttacataaatcaatgcgtaatagtgatgttgacgcggcgatttactggttgatgcggatgctagccggcggtgaagatccgctgtatatcgctcggcgtttgattcggtttgcgagtgaggacattgggctagctgaccggcaggcattgccactgacggtagcagtctttcaggcgtgccagttgatcggtatgcctgagtgtgacgtgaatttgacggaagcagtgacttatttagccttagcaccgaagtccaatgcattatacgcggctaaatcggcagcgcaagcagatatcaaagcgacgggtaatttaccggtccccttacagattcgcaacgcaccgacaaaattaatgaaagatttaggttatggttctgattacaaatatgcccatgatacagcggccaaattaaccacgatgacgacgatgccacctgagttaaaacagcaccggtactatgagccgactagccagggacaggagaaagcctggcaacagcgcctagctgctattcgccagtggcaccagcaacatccgcaaaccgaaccgtcagatgatgagacataaagattgcaatttaatgagaattcactaaaattagatttgggtgaggagcagaccctggttggggtgtaggaaattcagcgttttcatgttaaaataacatgttgtactagcttaatgcaggttagtggtgataaatcactgattcgtacggtttttagataagttgaatattaggagtgactaaaagtaaatgagtcgaatattaattattgaggatgaaaaaaacctcgcacgcttcgttgaattagaattaaaacacgaaggctatgatattcaagtcgaatataacggccgtaaagggttagacgcagcgttagctgaagattttgatgccatcctattagacctgatgttaccagaactgaacggtttggaagtctgccggcgggttcgtgaagtcaagaacacgccgatcattatgatgacggcccgtgactccgtgattgatcgagtttccggcctggatcatggggcagatgattacattgttaagccatttgctatcgaagaattacttgcccgcttacgagcactattgcggcgaatcgatttggaaagtgaacaacaaagcactaaacaaacgaccgtcacttataaagacttgacgattgaaaaggaaaacttagtcgttaaacgtggcgacgaagtcatcaacttgacgaagcgtgaatatgaactgttattaactttaatggaaaatattaacgttgtcctcgctcgtgatgtcttactaaacaaagtatggggttacgaatcagaagttgaaacgaatgtcgtcgacgtttatattcgttacttacggaacaagattgaccgaccaggagaaaagagttacatccaaactgttcgtgggactggatacgtgattcgttcttaatgactgacgctgatacgaatcaagtgacgcctaaaccacggcgccgttggtcattaaaatggaaatgggcgctcgggaccgcaattgggtccgcgctcatttttatttgtttttcattattggtctataagagtttcacgaacctcttattgcaccaagaacaacggaacgtggctagtgctgttacaacggtgcaacaatcgttgcgaacggagtcgaaagggctgaccattaagtcggtggccgctaaattgcaacccgaggcgagcgttgaaccggcaactaccatgagtgaacgtaagcatggtgtgctgcaaagtaaaatcttttcagattccgatttaacagccttatcccgcacaaacttagctgtgacggtttatgatccacacgggaacacactctatctatcccgcaaggatgcacatgagttctctaagaataagacgcgtcaggtggtgttgattggccgaggaagtgatgctgaattagttgggcgggcgcccatttatgcggctagcaatcaccgtttgatcggttacacccaggtcactgataatttggcggaataccattcaacgactcagaatttgatctggatctttattgtaatgacaatgatcactatttttggtgccacgctactgggctacttcttagctgcgtttctattacggccaatgcgtaaaatcaaacagacgattaatgcggtcaatgatgatccgcaaactgactcgcgagtgcccgatcttaaacgcaatgatgaattgtcggatttagcagttgtattcaatgatatgcttgatcagatgcaacgctatattaatcaacagcagcaatttgttgaagacgtttcccatgaattacggaccccggtggcaattatccagggccatatggagttgctgaatcgatggggcaaggatgatccacaagtgttgtcggaatcattggcggctagtttgtcagaaaccaagcgaatgcagagcttagttcaagaaatgttggacttatcgcgtgctgaacaattggaaatcaattttagccatgagacgtcggacgttcagaagttagtgacgcaagcatttaacgattttacgatgattcatcccgactttcattttacgtttgatgatgatgttaaaaagccggtgtatgctcagatttaccgtaatcacctcgagcaaattctgattattttattggataatgcggtcaagtactcgacacgacgtaaagaaatccatttatcattatccacggattatcgctacattgaagtcgccgtccaagactttggtgagggtatttctaaggacaatctcgatcgggttttcaaccgtttctatcgggttgataaggcgcgtagccgtgataagggtggtaacgggttaggattatccattgcgcaacggttagttgaaggttaccatggtcatattagtgttgaatctgtggtgggccagggctcgatctttcggttccagttaccgattctacgggacgcgaagctcttagctaaggccgaggctgaaacgaatgatgttgaaaagattgccaagtcggaactgccagccggaatccgaccagctactcgtgatgaagatgaagcgcccttggatgatcatgagcacgaccactaggtaatcgagtcatttatgaatttaaaacgcacattcaagttaatttaacttgaatgtgcgttttcagtatggataattgcgctgtaatgaattttaaagccgcggcctatgggatcatatcgtgattttgagggaggcctggatcaatattgagcatcgactgacagttcgatagggcgcagtaagatgctgattaaacgacgaataggttgtacaccagcaggctgggtttaatcctgattcagattgatccgactcgaaatatatttaagctgaccgatatttgttggtatgttcatcatgaaaccattttcacaagtaaccttttttggtatagtggaagagtagttaatttaatcagggggcgaagttgttgacgaacgaaccaacttatcggccaatgacgttcaaaatttttttggaattcattcggctaaatgccaaggcagctagtgtggtgccgtattttattggtattttattttcaatctattattttcatgcgtttaattggatcaattcgttaatttacttagttgcacaagtagcgattgcattgtttgtgacggggtttaataacgtgcaggattactacttggctaaggatttacattatcgggatacttataacattgttggccgtgagcacctatcaccacgacgatcattgaatttgatgctagcgatgttagcaactgcaattattttaggattagtgctagtcgtcagaacaaacctattgttactgttcatgggcgctgcagcgattggtgtggctatcttctatacctatggcccggtgccgttttcgcgcttcccgttgggtgaattactgtcaggatgtgtcgaaggatttggcgttttctttctgagtgtttatatgaacgtcgcgacccccgtactggcgggctttaagtttgcttggccgcagtttgcgattgtggggaacttagagaacatattggtcatgattttagtggggctaccagggattttcttggttgcgaatatcatgttagctgataatatttcagatttacaacaggatattcgcaatgaacgttatacggttccgtactatattggtcatcgttggtcactacgggtctacgatacgctagcgctgttaggttatttgccagtgctgatgagtgttgttttacaaatactaccgatttatcagctggcagtgttgctcgttttaccaaaaattttgaagaatattcgggcctttaacgcggtgcaagtgaaagaaaccacctttaatacggcaccacaaaatttgatgatgtttcaaggcatgcaattacttggactgatcctgggtattttcttttaatccggtctgattaattgggatggttcacaaaaacggcggccgtcatccagcataattgctgaatgacggccgccattttttgtgtcgctgttttttagaccttgttagtcatgtactgcggttgttttcggcggctatttactgatcaaccgcacggtactgcggccatcccccatctttttgatgagaacttgttggccaatcgttcgtttcattgattcaatgtgactgataacaccgaccattcggttttcaccaattgtttcgagtgcctgcatcgctttttccaaagtttcatcatccagagagccgaagccttcgtcgacaaacagtgcgtcgatttggacgccattagccgaagattgaacgacctcactgagcgagagtgcaatcgacagagcagcaatgaaggtttcaccaccggacaacgtgttggatgaacgcgagttgccggtttcattatcgtaaacattgatatcgaggccgtggtcactgcggttatcactcgcttcggcagctagttcaaatgtgtagcggttattggaaagcaggttgataaagtgatcattggcgtagtttaagacgcgttgcaagtagttttggacaacgtaggtctctaacttgagcttgtgatcgttgccatctttaccagtcatgatattatacaggcttgtaatttcggcgaaccgctttgcaaatgtgccttgctggtgcatgatttgttggactttttcgagacaactttgcgcgtcggttaaggcttgttccgccacggtttgggattgcagtgcccgatccttatgagcttgcaggtcggccagctgagcttggatacccgtaatattcggtcgttcaacgttcgttaaggcggtttgcagttgcttgatttcggttgtcagacgctccttgtcttgccgataggtggcaatttggacttgcagggcggtcagtcgaccattggcgagttcttctaaccaattttcaagtacagtttggtcatgagtcggtgcttctggagcagctaaggcctgtgcgattgtttgctcaagctgcgtgcgcgtggcctgtgttgtcttcaaccggtcgtttaaatcatcgagcttagtttgatgttttgataaagtaagttgactggtttgaacggtggcttgggcggcctctaggcgttgttggtaggtcgcgacgatctgattgagatgcgctttttcggccagcaggtcagcgcttgtgacttgtaagtccgtaccaatggctgcctgagctaccgtcaaatcggctgttttattgcgcaataaggcccgttgttcgcctaactgtaactccgtttgttgggcctgtttttgttgtgcttccagttcagcagtatatttctcaatagcttgaaccactcgttgggctgcctcaagcttcttcgtaattgtggcgagttgctcagcgaaaaaagccctgactgcggtcaaatcgtagggtgactttagtgctagtccgttggtttcaatcaactgttggtaagttgaagttagttgcgtttgggcggtggttacttgctgcgtagcctggtcaacttctttttcagcctgttcgacacgttgttgagttgcttccacttgcttgttggctgccgccagcgcgttttgagcgtcgtcaacggcttgcatggattgtcgtaagtcagcttcatttgcaacgatggttgtgaacggcatctgtgaatgatcggttgatccacagaccacgcagggctggccgtcaacgagttcttgttgtaattgggcaatcattaagctttggcgttgaccacgttgttgttcaaattggacttgcgcattgtgctgattctgttcatcgcgggcaagctgcgcccgtaaatcagtcagttgcttggtgacgcgctgctgttcttgttgcgcacctcgccattgactatcaagtggtgtcagggtgtcgacgaactgttctcgttgtttaatcagcaaatctttagtggcgtgtaagtcatcaatagatggcaagttcgcttgttgggtggtgattttggctgttaatgtctttattacggtttggtgctgttcaaaagtcgccttcagatcagcgacactcggcttgagctttgcgagctgtgcgatgagactttcaacgcgttgcgcttgtggaatcaacgtggccaattgttccaagcgctgctggtgctgatggttagcttcactttggtcatgtaattgttgaactgcagcttgcgcttggcgatagtcgtcctgcgcttgttgcacgttatccatagctgcttgctggtcaagtgtcaattgcttttggtcacgtgtttgttgagtgagggcttgcatggtggcttgtaggggctgggcccaagttaacgcgtgcaactgttgcttggctatggtaattgccggtgtttgttcttcaactttagtttgataatcagcttgcgcctgtgtgagccggtcaaattgttgttggcgatcgcgtgcttgctggtaggtcgtttcggccgctttaacagaccgattgattttactagtcgtttgctgtgcttggtcaaaaacactttgacgcgtcgtaacaaatgctcgtagtagtggaattttttgatcgtccggaactgcttgaagttgagcctgttccgcatcattccaagttgctgaggctagtgcgacccgcaaatcggcgacaaactgatcaccagtcttgctggcggtttgatactccgctttaagttccgcagtaaagtctgaataaagttgcgttccaaaaatctttttaaggattttttccttgtcagtcgtttttgactttaagaattccgagaagtcattttgggggagtagaatgatttttttaaattgatcagcagtcaaattcaagatggtcgtgatctcgggaccaacgtcggccggcttggttgcaatgctctcaatctccacgccaccaacgtgatcaacgacagctaatttggccgtactattctttttcgtcagtccagatccttttttcttagctaagtattgttcaggggagcgcgcaatcttatagagttgattgccttgctcaaagtagaaggtgacgcttgtcggttggtcagcgggggcgaactgactgcgcatctctttggctgcccgaccatccgtcccatcattcgtcgtactgccaaagagggcaaaagtcatggcatcgaaaatagttgatttaccggccccagtatcaccactaatcagaaaaatcggggtactttctagcttgctaaaatcaataattgaatgttcgtgggggccaaaatagttcatggctaaataaacgggtttcacggctaatcctcttttcttaagttgacgaaaatctggtcaacgagttgttgttgtgtcgttgagagctggttaccagtaatcgcgtggaaaaattgcccaacaatggcatcaggactcagttcgttcatgttttttgggccactaatggcggtggcttggtggttcgattcgtagtccagttcgacaattgtgccgtagatttgttcgagttgcgcccggacgttcagatgcttactacggtcgaattcctggacggtgatcgcaaaccaagcctgctttaacggctgttgctgataaaagttgggatcaagtaacgtttcccaaggcgcacgcaacgtaaccaagtcagtttgcggctgaattggcttgaattcatgggtgatcgcagtgggtgtgattgtcacaatttcaacacctttgccatggaacttagggttggcttccttgacgttaaatttgacggggctaccggcataacgaattcgatctttgtcgggtgaggctaaccgagtgtgaatatggcccagcatcacgtagtcgaagtctgcgaataaatcggtggtcagcgtcgccaaaccgcccactttggaagttgtttcacttgttaattccaagtcgtcatctgctttgggtgtaacggtaaaatgagtaatcaacaagtgccgtttttcaggatcaaaggtggtaacgaggtcactaaccacgcgttgcatcgcatcgtgaatggtgtgaatcgccttgacttgtttttcgggcaaaccttgttgctgatagtagacccgcgcgtcaatggggtcaaaaaacggtaacataaagatttgtgccgttggggtctcgatgggcgtgaaggcctcggctagtaacgtattgatatgaaaattattataggctagccattcacgaccgtagttgagacgtttggcgccatcatggttgccagcaatggcatagattggtaggtgatgctcgatattaatagcctgcagcatgtggtcgagtgaagtgaccgcatcggtactcggaacggcccggtcgtagatgtccccagcaatcacgataccatcaactttttcagccaatgcaatcgttagaatttgcttgaacgctgcttcctgttcatctaacaaagaataaccgttaagcgtccggccgatgtgccaatccgctgtatgtagtaacttcatgggagttcctccttgagtttgaattgttaatttccattatcgcatatttacataaaatttcaggtctcgaagtgtcgtctgcccaaagtagattaattttgacgaaatacgtttgatttagtttggaatgttggcggacaaacttgaaagtgggcaagttctaccccttattatgcaattcagctataattgcgcttaactagttgagcaattattgattgcaacatacgggtgagtgatttgctggtcatccttgctctcagcgattgcgtgttttagtcacgcatcacgcataacgtcggactcggtattagaataattatggtgctgcaatctcattgggttagcagtttaaaatgggggcttactcatgattccagaaaaatggcaacagacgcttggggttaaattgtttatcatggtaaatttaatcaatttggtcatcttagcagtgatcaaactggccagtggtgcgcccgtgtggcgagttcgtaatgcaccgttggccgtggttggtgggttatttttaattgggattagtttaattttgatctgtaaacagaatcccaactggcgcaagggaacgtatctcggtgctgatattaacttgaccgttttattttatttgttacttattgatttcaaccggatttccacgcttggctttgcgctgattgcgataatcatctcgattgtcgcattaccgatggcatatacttctcgtaatcgcttggttggaatccggattccgtggacctatttgtcagaagaaaactggcatcggactaacgtgctagcaggcagattatttggaatctcaggaccgctgttagtagcgatgggaaagatgtcaacagactcatttctcaatgcctttgttacgattatcgtgttggtcgtgattttgaccgtgggttattcctaccggttaagtaagaaattaatctgatcgggcctggcagcgttaattggcatcccgtggtaatgtttgcaaaatcagttaaggtgacggctgtgtgccggttaggtgcaacgtaaaaagcaccgccatgagaattttcatgacggtgctttagtgttgattaagcttcagtggttatttacggtgtcgttgttgtttaccggcattccgaccacgccccgcattattttgcggacgaggatgactaggcttggattcagttgcattaatcggctttggttgcgtcggtgttggtgttttgatggggtgctttttgagttctgcttcaacttcacgccgaatacgtggccggaagaagttgatgatcagtgtttgcaagcaggcaaacaaaccaccaacgaagaagtaaagtcctaaacctgcgggagcggacatggaaacaaataaaatcatgaccggactcataatgagcatgagacgcatcgtcttcttctgttcttcaggtaaaccaatcatggataggtaaccctgtgccaagtaggataaaaaggctaaaatggctagaatcagactggatttcccaagggagatccccataaaggtcgccttagataattcaggcgaatagcgaatagcgtagtacaaggcggagaaaattggcagttgaatcagtagtggtaaacagccaataccaccagtcatgctaataccgttgtcacggtaaagttgcatgagctcattactgattgcggctttttcttcctgagtcgtcgctgctttttgccgtgcctggattttttccatctgtggccgaaccgcggacattttttcttgttggtaggttgatttacgttgttgattaatcatcattggcagtaaaacgagtcgcacaatgaccgtcaagccgatgattgcccaaccgtagttgttaccgaatagttgtgacaaccattccatcacgttttgccctggctttgcaaggtactcgtaaacaaacccgtatggtttaccagctttggtcgtttgcacacaaccgcttagaaacagtgctaacgttcctaaggtgatggtgagcgtaaggcctttttttgatttcactagttaataatcccctttgttaaagtcatataatgatgatgatactaaagatgtcgggggaattcaattggttatccgaaaatcgtgatagttttgtggttcaacttcatgcacttcgaggtgcttgaccttgccaaaatcggttggcgactgccgaacaacgtcgataaagactttcactcgttgatcttcaccctcggcttcaataaagactgagccgtccatcaggttacgaacgattccgttcacgccgcatttgtcagcggcaactttagtggcccaacggaagcccaccccctggacccggccgattgcttttaatgttactgcacgcattgtgtcacttccttacttaacttgttcagctagtctaacctgtgactagcatcttgattgtattgtgttagcataattagtacaatctgtattacttatataatagcatggaaatgttcaacgggcgatatgctatacttgggataaaacggacactttcgaatgatacagggtgccccgaattgacaagaccggctgatgtttcaaccgattaattaaaggaagttgacgatggaaaaaattaattcattacaaaatgcgcacgtcaaggcgtggaaaaagctccaaacaaagaagggacgcaaacaacagggacaatacttgctagatggttggcatttagtcaacgaagcagttaaagcacacgtcgcgattcagaccttgctcattactgccaagcaactggcgaccgaaccggatttgactcattttccagcggtcattgaaatctctgatgaagtcgccaaacatatcagtgcgacggtgacgccgcagggggtgtttgcgctggcgaccctgcctgctgcaattgaagatctatcacaattagatttaacgcggccttggttactgctcgataatgttcaagatcccggaaatattggaaccatggtacggactgcggatgctgcgggttttgccggcgtcgctttcggtaccgggacggtggacatccatcaacccaaagttgaacgagctatgcaggggagtcagtttcatttacaactgattagtactgatctcgacaagttggttgaccaattgcaggcgcagggttcaccagtctacggttcagagttaaatccacaggcagcccggtatttagatattgacgcgccggctagttttggcttgatcatgggaaacgaaggtaatggaatgagtcgggaattattggcacggacagaccaaaacttatacattcccatcaaggggcaagcagaatcgttaaatgtagccgtggctgctggcgttttaatgttcggtttatatcgctaacttacaattagtaagaaaatgctaaaatccaggtaaaatactttcaaaatgactggctttttagtagaatagccgtagatattagcaaagggagctttagatgaaaactaataatgcgtggcaacaagattctgaatacgtggcgatcgtcgaagatttattagcacagccggccgttcagcggcttgctgagtttacacagcaccaccattcaaatcgattggatcattcgattgcagtttcatatgatagttatgttttagcgaagaaatggcatctaaatacgacggcagtggcgcgtggtggattattgcatgatttgttttattatgactggcgtgaaaccaagtttgatctcggctcgcacgcatttattcatccgcgggtagcgttacgtaacgctgaaaagttaacgaaattaacgccgatggaaaaagatatcattttgaagcatatgtttggtgcaactttagctgtgcctaaatatcgtgaaagtttgctcgtctctttagttgatgattatgaagcagaacatgaattttttggaccattacgtatgaaagtggccaaacaactagatcggttccgaggcaaggtctccgccggttaattcaataattgggggtcattgcatgtcagaaatgctagctgacacggtaacagaatccaacgtggatttcgaactgtgtccaaaatttgaaaagacgttctcaattctagggaaaaagtggaacggtttaattatcgatgttttactggaagacggtccccaacgctttaagaatctggcacgccggattcctaagtgcagtgatcgggtgctggtcgttcgtctcaaggaattggaagaaaacggcattgtgagtcgggtaacccattgtgactctgccctgattgagtatcgcttgactacgaaggggcaagatttacgacaggtcatggatacggtccataactggtctgataagtggttcagcccggccgaatcctaatacggggttgacgtgcagggcactttgccataaactgacaatgtagataaaagccttgacgagaaatagtagttagttacggcgtcgtagggacgggtgtcaccgattgaaagcaccctggcgaccaagattgacgaattcactctctgagctgaaattgggcgtttgtgtaaacaaataattttccggtatcccgaccgttatgacgggtagtgagtgtgcatagtgactgctatgcaaacaagggtggtaccgcgatgacctcgtcccttttcagggatggggtctttttttgtccgcaacgcaactaaaaattggaggcagcatatgagtttacaagatcgattaaccgaattacgcgatcaaggcttggccgatattaaatccgccgatgttttgaaaaaggttaaccaagtcaaagttgatttacttggcaaaaagggtccgattacagaagtattgcgcggaatgcgcgacttaagcccggaagaacggccaaaggtgggcgcttatgccaacgaagttcgtgaccggattcaggctgcgattgatgaacgccgtgaagaactggaacaagcagccgttaatgagcaattggctgccgaaaaactggacgtgacgttaccgggtcgggaagttccacaaggtcagcctcacgtgattacccagattattactgaattggaagatctatttatgggaatgggctatcaaattgttgatggtgatgaagttgaagaagattactacaactttgaacggttgaacttaccgaaggaccatcccgcccgtgacatgcaagacacgttctatattaccaaagacgtgctactacgcacgcagacgtctgctgatcagccgcggtcacttgaaaatcacgatttttctaaaggaccgctgaaggtcttgtcacctggccgcgtttatcggcgtgatacggatgatgcaacccattcccatcaatttcatcaaattgaagggttagtcgtggacaagcatattacgatggctgatttgaagggcaccttaattctggttgccaagactttgtttggcgatcaattcgatgttcggctacggccaagcttctttccattcacggaaccatccgtagaagctgatgtaacttgctttaattgcaatggcaagggctgtgcaatctgtaagcaaacgggttggatcgaagtactgggtgccggcatggttcacccccacgtgttagaaatgtctggcattgatccagaagaatatggtggttttgcctttgggttaggaccagaccgctttgcaatgttgaaatacggtgttgacgatatccgcaacttctacttgaatgacgtgcggttcttgtcacagttctataagaaaggttaggcgtccacatgagaatttctacgacatggttacgcgattatttgaagctggacattccggccgatgaattagcagaaaagattgaacggacggccgttgaagttgacggtgttattcgtcccagtgaaggattgaaaaaagttgtagtggggcacgtcttaacgtgtgagccacatccagattctgatcatctccacgtttgtcaagtggacgtaggcgaatcagaacccttgcaaatcgtttgtggggcacctaacgttgcggctggcgaaaaggtgatcgtggcgttacccaattcatggattggtggtcacactaagatcaagaagagtaagatgcggggagttccatcaaatgggatgctgtgcgccttagacgaacttggttttgatgaaaagttagttccaaaagaagttgcggatggtattttcattctgcctgacgatgccacgccaggtgatccggtcttttcatacctagggatggatgatgaaattattgacatgtccgttacccctaaccgtggtgacatgcttagtatgaatggtacggcgcatgaacttgctgccatttacgaccaacaaccaacgatgccgaaagttgatttgcatgaagatgctacgacggtggctgcggatgatctacatgtggctgtcgctgccgacgaacatgatgtcccaatgtacaaaatgcgtctaattaaaaacgttacgattaagccaagtccgttatggctccaaattcgaatttggaatgctggtatgcggccaatcaataacgtcgttgacgcaacgaactacattttgatgcaatatggacaaccgctacatgcttttgactttgatcaattgaatgacggtcaaattaacgtccggttggcgaaagctggcgagcatttaacgacgttagatggtgaagatcgcgaattactaacgagtgatctgttgatttgtagtggcgatcaaccaatttgtttggctgggacgatgggtggcctagcgaccgaagtcactgatcagactacgaccattgcgttggaaggtgcggtttttgatgcagttaagattcgtaaaactgcccataatcatgacttacacagcgaagcttcaatgcgctacgaacggggcattgaccacggcatgaccgcaacggccttagacgctgccgcagccatgattgcagaacttggtgatggtcaagttgctagtggtatggtcatcggtcgtgacgaggatgtgcaaccaacgacagtaaccattgacttagcacggatcaaccacgtcttaggaactgagttgtcattggacacggtcagtgatatttttaaacgattggactttccaacggtcgttgctaatgaaacgttcacggttacggtgccatcacggcgttgggatatccatattccggctgaccttatcgaagaaatcgcccggctatacggttatgataacttaccagcgaccctaccaacgggccaaccaacaatcggtaagcttaatgagacccaacaggtgattcgtgactcacgtaagttaatggaaagtgctggcctcacgcaagccatcagttactcattgaccacggagactaagtcgaaggcctttgcgcttcatgctagtgacgtcactaaattagactttccaatgagttcagaacggaccacgctacgcttgagtctagtttctggtttgctggatgatttagcttataacaatgctcgtaaggaacacaatgtggcattgtatgaagaaggacgggtcttttacagtcaacctgaacaagtccggccgaaggaaattgaacacattgccggagctattacgggttccatggttcccaagagctggggcgttgccgaacaacccgttgatttcttccagattaagggtatcgtggctggttatctgaagagtctggcgttgcaagatgccgttagttacgttgccacggccgaacatccagagatgcatcctggtcggacagctgatatttacgttggtgaccagttagtcggtttcgtcggtgaagttcatccaacgactgccaaagcctacaagattcgggaaacttatgtctttgaactggatttaacggcgttgattgccttaccaaaagcgcgtcaacagtatcaaccgatttccaagttcccaagtatcacccgggacgtggcgatgttgattgatgacgatgtgaccaacgcaaccgtggttgccttgatcaacaagaagggcggcgcgcatttacggcacgttcaactctttgatgtttataatgggagtcacgtgccagcgggtaaaaagtcgctagcttatacgttaacgtatcaagaccaaaacgcaacgttagtcgatgatgatgttacgacagcatttgaaaaagtactgacagccttaacggatgaattaggtgctgaaattcgttagtttgttgatagtcttgttaaacgccgaatgatttgaagtcattcggcgtttaatgtgtgtccaagatcctaaaaaaccataaaactaatggcgaactagtgcaaactgggcaacagttttgtataattgataagattaatcaataaatggaggggcgagtcttgaataacaaccaggataaccaagatcagaaggatcaaaacgattcacaagatcgtggggtaaatgaacctaatcgttcagaacaaaaacagcggaaatcattttcgaaacacgttattggtggcgttgttggtattttagtcgtacttttaattattgtgggggtattgggttatcgatattttgataatgcgacgcaaccatatgacagtagcgacaatcgcgtcgttcaagttgatatcccgtacggtgctaatggtaagaaaattgccgatattttacagcgcgaaaaggtgatcaagagtggttttgtctttgaatactggacgaaagcacacaacttatcaaactttcacgcgggctactatcagttgaagccttcgatgtcacttgctcaaatcgcgaaggccttgaataaaggtggttcatcggaaccggttcagagttctagtggtaaagtcctaatcgttgaaggtagtcagattaagacgattgcgaagacggttcaaaaacaaactgatttcacgtcggcagaatttctagccttaatgaaggatcaaacattcatcaaatcattggccaagaagtatccacaattgttgaattcagcgatgagtgctaagcaagttcgctatcgtttagaaggctatttgttcccggcaacttatgttgttggtaagaaaacaactttgaaacaattagtaacgcagatggtttcgaagactaatgatgagcttgaaccatactacgcgcaaattaagaagtcgaagatgtccgtgcaagaagtaatgaccttagcgtccttagttgaacgtgaaggcagtacgacgaaagatcggcggttgattgctggcgtcttcttgaatcggttagatgctaagtggcgcttggattctgatatttcagtgttctatgcgatcaattctaacaagtcaacgttaacgaataaagatttgcagactgattcaccgtataacttacggttgaacttaggctacggccccggaccgttcaacagtcctagtttaacatcgatcaaggcagtcttagatcctgcacaacggagcaagggttacatgtatttcgtagcagatttgaagactggtgatgtctattatgcaaaggatgctgcgggtcacgcggcaaacatcaagaaggtttcgaagcacaacgaagccgctgaaaaataagaatgaggcgtaacttaaatgactgaaaataaacatcgccgaccagtagtcatcggggtaactggtggttccggtagtggtaaaactacggtcagcaatgcaatttacaaccaattatctggtcaatcattgttgatcttacaacaggattcctattacaatgatcaaagtgaaatgacaatggctgagcgccatgccgttaattacgaccacccactggctttcgatacagatttgatgattaagcaaatcaagcagttgctggcctatcaaccaattgaaaagccggtctatgattacgagcagtatacgcgtagcgacaagaccattcatcaagaaccgcgtgatgtgatcattgtcgaaggggtattgatcctagatgatcagcgtttacgcgacctgatggatattaaggtgttcgtcgataccgacgatgatattcgaatcattcggcgcattcagcgtgatatcaaagagcggggccggacactagactctgtgattggtcaatatttggcgacggtcaaaccaatgtatcatcagtttgtggaaccaacgaaacgttatgccgatctaattgtgccagaaggtggcgaaaatgaagttgccattgatttattgacaactaaagttcgttcaattttataaaaaataacgtcttaaccagcgctattttagatttaagagtttacttttaaaatctgaaatggtaggctggtttttgataactatattgcgtatttgaggagtgaaacacattggctgaagataagacatatccaatgacagaagaaggcaaggtcaagctggaaaaagagcttgaagaccttcgaattaatcaacgtccagaaattattaatcgtattaagatcgcacgtagctacggtgatttatcagaaaactctgagtatgaatcagcaaagaatgaacaaagcttgctagaaaaccggattaagacggttgaacacatgcttcaatatgctgaaatcatcgatagtgacaagattgacgaaacggaagtctccgttggtaaaatcgtgacgttcaaagaattacctgatgaagaaccagaaagctacaccattgttggtgctgccgaagctgatccaatggttggcaagatttctaatgattccccgatcgccaagggcttgattgggcatcacgttgatgaagaagttgccatcaacattccagccggtaccatgacggttaaaattttgaaggttgaaaacgcgtaattttatgcttaagactgttttgaggtagcggataccttgaaacagtcttttttggtggtttagaagcgcgattactgattaccagccactatttaacgaacgttactgaacaagcacgtttgcgtgtgagttcggaattcaagcaaaacacccgcttatctgcacaaagcaggtaaacgggtgagtaaattggacgtgttacatttttttagcatttactatgattaaaacatgccagttgtgtaggttcgaaaacagccagcttagacccgctggaaacagctcgaactcgcgtagacttttgttgtgggttcgtcctacgccgacctccaggcatttctgccaattgccggaacgtggtgggcacagatttgagccgaaacaccacgtctcaaatactggcctttcactaaccaagcaaaggacgcttgctaagtgaaatttcaccactgggcattgtcagaaacgccttccagtcgggatagtattcgaatggcagacggtgaggtacccaacttttgataaattggccattgcttttcaaaaacggtaattttgtcaatcaactgtcagactgagagtgatattgtacttaaggttccagtattaaaatagtcgacgaccaattgcaccaagttaagtggccgtttatcagccattcgagcgggtttccgaaatgtgctcggtaccactgaagcctgtgcgtgctacgccaacggactaatgccaaaaccgcattaatccgatggctaggcaatgctcggcttcaacccgtgacccctcacaggcttgagaccggaggggctgggtgacaatgctcagtagccaaattattcttagctggaagtgggttgcttccggcttagaataagactcgtatttgagatgacgcgggttatgcgttagctcaaatcgacgtcggctgcgttccagcaattggcacccagccccggaggtcggaataggacgcgcaagtgctgatgaacagtaatccaaccaactggcatgttttaatcatgatttatgacagattgatcaggatatggccgacagcaaagtagggttagatatagataattcgtaattcaccaagcgagacgctgccggttagtatgacacccgggccagcagtggtcggtgtacctgtcgatgagatgtggcccattgagttgctgagattttcctgtagctgccaagtttgagggaggtataactcaaggctacctaatgaaacgtcgacattgatggttgctcggccttctttgatgtcagcgtcatcgaagtagattttggcaccagccattgatacgttcagatccgcagaacgaaaattttcgctgtgaacgtagcggatactgttgcctagtgagagatctaaattaacatggtcatcgttgattgtgctcgttgattcatggacgtcatcgtggttatgatgattgtaatgagcatgatcatggttgtgatagcgataatgatattgataacggggatgaatcaaaagacccaaaccaatgctgagtaatacggcagcccctaaaattgtccatggtacgagcttagtgattccaagtggttgcgcatagatcatggttaagaatgcgatagcgaagacgacgcccggcatattcaagtaacgaaggctactaattaaagccgcaactagaatcaatgttaacaagagactccagatgctgacgtggagcgtgaagagaccgagttgactaacgataagaacaacggcgctggcaattaagaagacgggccaaaaccaatttttatgcatttataacagtcctttctgttcaagacttattttgagttggcgatagtagcgtcttgaagcgtacagttgtttaggtgagtggtgaaacgcaatcaagttcccggtcaatgtcttggttaaggaatagacttgtttggtattgacaatggcagatttggagacgcgaagaaagtaagcaggtaagcctgtgcccacagcggtcagcgacttgggaacacgataaacattatccagcgtatgggcggcgacctggtgaccagttgcttcgatgaataggatcgaagtaagcggtaactgtacgagttgaccacgttgtgaaacggttaacgtagcggcctcaattgaaagatttttgagagcagcagtgagggcggccgtttcggggtagtcgactggaacatgcagtgtgacggttggaattgaggtgtcgggctccgtttcaatgttcacttgcatgggtttcacctccttaagtagtttaagtacaccacaaaacaatgacgctgtaaataaagactcccttagcggtcatttcaggaacgcaactggtcattggcttgctcatcgactgtcaatgttgcgttttatgggcaaaaagggcacaattactgtaaacgatttcaatgatgaggtgttagtaatgaaaataacaattacagatttggccagtaagtggtttcatgatgacatgggtgtaaccactggtaatggggtgcgcttttacggcaaaacttatggcaagacagcagttcacagtggcttctcaatcgggatcatgcgtgatgacgaaccccatcaaccgattgccatggttgaaaaggatggtgtcaattactatgtcaacgaccgtgatgaatggttctttaagggctatgatctcacagttgattatgatgaacaaaatgacggcccgaagtatgactacacgcccaataacgagtagttctggtgagtgcttgccaatagcgattaatatttggacaaaaaatcagcgttgaggctgtgacataagtctctagaaacaaagcaggtctggaaaaatcttcggatttttccagacctgcttttgatataatagaaaataaaaaaagagcatcggtcgcacccgatactctacgaaattatcctcgaaaggacattcctaatatgcaagattattataacatgaatcaaaccactttgagtattgccttggattaccaaccagaagatcatcattctgctcgttacatcaaccagcttgttgagagtttaaaactaaaatatgattaccagtttggccgtccgcgggaatataacctcggtgccatgttaaaactggtccttttagcgtacagctatggcattttcagcagtcgtaaaattgaacggtttgcccgtgaaaacaagccagctgggtggttaattgccgaccaaattccgtcctaccggacgatttgtcgctttagaatttctgatgaactggccactttgacaaccgatagcttatcacagctaacccaatatcttcgtcaaaatggcatgattgatgatgtttcatttattgatggaactaagatcctagccgacgccaacaagtatagctttgtttggaagaagaatacgatacgatttgacaagatgaatcgcgaaaaactcgttgacctgttaggcgagcttcatgaagctaaaattgtcggtgaaattccggcaggatcagagctgactcccgaactattggatatcatgattagcaaggttgaggatcacttagtggtccttaatgaaaccgtggaagcaactaagcaggtttccccgaacccagccaaacagcaacgccggactgttaaatcacaaaaacgtaagttggataaacgacgtgataaaatgcgtgaacaccaagcacagcaagcaatctatggtcagcgtaacagctactctaagacggatcacgatgccacctttatgcgggtcaaggaagatccgatgcaaaacggtcaattaaaacctgcctacaacgttcaaatcgccacgagtaatcagttcattacgggatatcggcttttccaaaatccaaccgacacacgaaccttacaaccgtttattgaacatttaaaggccaacaatgtgttaggtcacaccatcgttaccgatgccggatacggttccgaaagtaattatcggtacttggaagatgaattcggtcagcataccgttttgattccctacggcacaatgcttaaagagaatagtcgaaaatggcaaagtgatgaccgtaaggttatgaactgggactatcatgaaaaagatgattattttatcaatccgcaaaacgtccggtttaattttaatgcttatcgtcgacggactgataagtatggttttacccgtgactttaaagaatacattgccgaaaagtatgatgaaaatcatcaactaattgccgcggcactaacaccaaaaggatatcttaaaaggatttccgtgaacgaaaattgggaatatttcaaatcgaaacaacgagaattactttcagctccagaaactggtcagatttacgctcaacgtaagatcgatgttgagccagtttttggcaagatgaaggcttctttacatttcaatcgattctcggtgcgaggtttcgacaaggtcaccaaggaagccggaatcgtaatactggcgttaaacattatgaaactggtcacggtagggaccaactttaaaaatcaaaggcgtaagcaaatgggacgagaaaccaaaattcggtttctcgtcccatttgcttatacagaggctagttatgtcacagcctcaacgctgatttttgctgaccacatctttgactgtgaaccgggctaggcgtggtggcgtcgacgccggacgataaaccaaccagccgttgcgagggcactaatcccagtaatcagactaccagtgattaagaatggcggtcgatacgtcaaggtgaccgtatgcttgcccttacttaatgggacagcaacaaaggtattaatcactttcttagttgcgacggattttccatcaacagtggcatgccaacccttggagtaaggaatggtcgtcatcaaaacttggtgacgatgcttgatgttgattgtaccagtaatcttacgacttgagtgggccgtaatgttccaaggggattgctggagtttctgcgccgacttcttgaattgggtattatccaacttgtagagggtgaagttttgtaaccagagagaagtcttcttcatctgaatcccgaaggtcacggtcttgcccttgctatttgatgcaacgttaacagcgatcgtgtgccggtaagttgggtactgcttgagttccttaccgttaatgtagtaactcgcattcgaagtagttagattttgcccgagtgtgatgtagtaggaatcattggttgtcggcgtgaacttaaagtaaaccgaccccgttttcgctaaattttgtttgttcaagacggcgccagttaacgtcgtgaccttcttaacgttttggaagaccacttcgttaaagttttcggcactgatcaagccgctggttgaacgatttgctaaggtttggtaaatcaactcttgccgggcaatcggatcgccagttgttttggagactttcaagctagtaatcttgtcagacgctgcgaaaccaagacccagggcgtatggatttttgtaggtcgtgactttgttagtgctgagctttgccgatttttggtaattcgtcagatctttcttggtactggtgaccggaatgtagctacgatagttcgcgttatcagtctgggatgtcggtactgttttatccataaagtactgcatgtccagtaacgaatcggtaatcatggtcccgttggtgtaggcgaccacaccgtccccatccggctgaccaattgaaccgaaaaagttagggataatactttcgaaggtcgaactgaaatgatcagcaccgttataggccgcctgcatcggatcgtctttagttcgtgtaaacgtcttaccaattcgataaaaacgattgttgctagctttaattttgttgacggcattgtcaaggacttgcgtgtatttaccaaactcactttgtgacacgtaggaaatattatttaatgaagcgaccacgttgatcgacatatcagtcgcaactaaaattaacgcgacgatttgataaatgagacgtcgttccttaggcaacgttaagaaaatcaatgtaattgctgccaagccaattgtaattaagagattagcttgggtgacgtaggtgactttcttaatgttcaagtaaatggttgtaaacaaaccgaccagcaatgcgagcatcgttagcgcttgccacagtttgatcgttattttgtctgtcagtgcttgggcaccaatccagacgacccagaaacaaaagacaaaggagaagcggtaagggtaccaaactggaaattggcccgcatgccacaataaatcaagtggttcgtaacaaaatgataagataagcgtcgcggttacaatcaaggcgctcaacttcacggaccatttgaactggcgccgtaagaagaagagcacaaaggcgagaactgctaaccatgccacgtaaaagttcggttgaccggatggcatctgatcgaagttgaaagtaccggtgacgaacttagctaacattttccagggcgcgtattcaagtttccaatgaaccttggtcacattatattgagccttactttgaatgagcgcccagaaagttggtaatagcaaccatgcggagaatgcgacacctagcagaccaccccaagcaaatttgagggcgtgagttgctaaggtcttcacgttttgccaatacttagttgcgccatacaaccagtataaacaactgaataaaatgaccatgtagcccatataatagttgtcaattagcatgacggccagccagccagcgaagtaacggactttaccagttgtaaacaagcgttccagtcccaaaatgaccaatggtaaaatggcgaccgtgtctaaccagatcatgttgagctgattggcgaccatccagcccatcagtgcgtatgcggtactgaaagttggcaccaaccaacccttttgcgtctgcgttttagttagtagccaggcgaaggatagccctgcgaaaccatactttagtacagtgacgataaaaatgccggtagtgattgattgaccagggaatagtaagtagattaaattaaagggactcattaagtaataagcccagaccccaaccatctcgccaccaatcgttttggagaaggaatagaagaaagcactcggatcgtgcagtagggtatgccggaaataggaaaacaagtcaacgtattgttggcctaaatcgaccgttaacagactgcttgatccaaagggagccatgtgccgataaataaaataaccggtcatgatcagtaaaggtaaccaaaagctgatccataatggccatgtgcgcttgtcaaaaaaacgacggagtttcaaaaattgccacctcaatctctaataattcacagccaaacagaaaaataatcaaaaaaacattaaaatccgtaataacggctgaaatttttatgtctatcgtttagaataacataagtatggtatttatctaggattgctagtatcatctggtaaatttttgcgaaatgtttaccaaattaagaatgggagcgcctgagaattgaaattgtttaagaaaattacgataaatcgtgatcccaacaagtcgcatattccatttcggctgaacttcttgtttttcatcgttttcttgttatttgctgcgttgattgcgcagttagcttacttacaagttgactacggacagaagttccgaagtacagtgaattcagccaataatacgacggcaacgggaaacgttcaacggggatcgatttatgattcaaccggtcgggtcttagtgggaaacaaatcccaccaagcgattcaatacacgaaggggctgtcagttgcgtcgactaagatgtacgaagtggcgaataagttaggtgagtacttaaccattccaacggatacattaacggatcggaacttggctgattattacttagcgggggcggctaatttaaagtcggttgctaagaaggttaaaacgtctagcgacgatgatgttttgtacgcacgggaagtcgcctatgcggaaaaacatatcattaataatttaacgtctacgcaaaagaatgcggcggcgatttattataagatgagttcggcgtactcgctgtcaacggtcaatatcaaatcgactggtgtgacgagtacggagcttgctgaaatcggtgagcaccaatccgaaatgccaggagttaaggtcggaacgagttggactcggagttatcctaatgggactgacttgagtagtgtgctcgggacagttacgaccgaaaagcaagggctaccgagtgatagcatcaaaaccttgctggcagaaggctattctcgtgatgattcggttggtcagagccaattggaaaagcagtacgaaaatgtccttcgtggaaccaagtcacagactgaggtcaagacgcaggatggggtcattcaaaaggagattaagaagtacggtggccagaagggtgacaacgttcagctgacgattaattcgaagttccagaaaaaggttcaaagtatcattatgtctgaagccaaaacggtggggagtagcaatgcctactcgccaggagcctatgctgttgtaatgaaccctagcactggtgccatttatgcgttagcaggtgccagccggaatctatccactggtaaagtgactgaaaatgcgttgggaaccatcaaccaatccttcgttatggggtcggtcgttaagggtgctacggtcatgggtgccttgcaagatggtgtgattacacccacgaatagtactttgaccgatacgccgatcaagttagccggaacggccaccaagtcgtcatggtttaacaagaatggtggaactagtctgagtcttaacgcttcgactgccatggaagtttcttctaactcctatatgatgcaattagccatgaaggaaggtaacttcagctatgcgtctgggaaagccttgacgatgtctaattcggtcttctctaaacttcgtggttattttaacgagtttggcttaggtgttaagaccgggatcgacttgccgggtgaagcctcaggttaccaaggttcttcggcacagaaggatattggtaaagcgttagacttgtcctacgggaactacgatgcttacacgactattcagctggcgcaatacattgcgacaatggcaaatggtgggcaacgcattgcaccacacatcgtttccgctattactgggactaaatctaacgggtcccaaggggctgttaagactaatgttaagccacgtgtcctgaataccattgacgtcccatcctcatactttgatgtcgtacaccaagggtattgggatgtggtccatgggagtatgacgcagcggacggggagtgcactagctagtttatcaccagcggttgcagctaagtccgggactgccgagacattccacggaacgacatctactgaaacgttaagtttggtgacttatgcgccttataagaaccctaaagtagtgatagcggttgcctttccaggaattactgctactagtggtgattataatatggtcgttgctaagcaaatttatgcagcgttctggaagtattataacaagtaaaaaatcagcttttttcgtgccagtatcttaattgatactggtattttttaatcattaatggtatagtagttcaagttaagggttccggccctgtaatatgcgaatgagtttggagggtcaacaacatgcgggtacacattacacttgaatgtacagaatgccatgaacgcaactacttatcttcaaagaaccgccggaacaatccggaccgggttgaatttaagaagtattgtccacgggaacacaaagtgacattacatcgtgaaacaaaataacaacggggactcctgttgttttttctgtaacattgtcatcagacaatgggtttctcatttgttggcaactgccaaattgatttttcaatttgacatgttaatgaatgagatttttttataccaattttattttcgggggtgccgtacgtggagaaaaaagcatttcgtaagcaacagcttgggcgattaagccaaatgacgccggctgaccggcaacggcaaaaccaggcgttacagactcaattatttgcaagcccaacatggcaaactgcccaggtcattgccatgacaattagtagtgacatcgaagtagcgacgcgcccacttattgaacaagcttgggcggagggcaaaatggtggttattccaaaaacgctgccgcatcgtcaaatggctttttatccttaccaagcgactgatcgacttgagcgaacgtcttttggaatcccagagcccgtcacgggtgaaccagtcgccaagcaacagatcgatctgatcttagttcctggtcttgggtacagccgtgaccggcacgcccggattggatttggtggtggctactacgatcgttacctcgctgattatccgggtaagaagttgacactggcttatgacgagatggcttttgaacacgctgaatggccggttgatcaatatgacgtcttgttagacgaactcttggtagcaggggatgaacaacatgatgagaattaaacgctggtggcaaactgaaccggctatcacgcaggtgctacttggaattactgtggcagtcttcttagtcgagtggctgatgggcgacggcgccatgctggtttttaattcactaggtgctaagaacaatcaagcaattgcggccggccagtggtggcgattggtgacgccgatgtttttacatatgggacttacccatattgcactgaatggtgtcgttatttattttatgggcatgcaaattgaagcaatgtatggtcattggcggatgctggcaatttatattttgggtggcattagtggtaacattatgagtttcgcgttatccaataatcagtcagtaggggccagtacggcgtgtttcgcactctttggtgcctttttgacgattggggaatcgttctgggaaaatccagtgattcgccagctcacgaaccaatttttactactaaccgttttgaatttagtattcgatatgttctcgaatggcattgatatctggggacatgtcgggggtctagttggtggctttttgttaggctatctgctgggtgtaccacgaattggcaagattgcgccgctgaaacgaattgtggcaacggttattctagtcattggctggttagctttattaaaaatgggttttacaaatgctaatttaactgtataattaatcgaggatatgcacatgaaaacactttacgacgtccaacaattacttaaaaaatttggcgtgtacgtgtacgtaggcaagcgaatttgggatattgagttaatggccattgagatcgatcatctctatcaagctggtgtcattgacccgaagatgtatgcccgcgtcaagctcgtattgagccatgagcaccggatagaagcagaacgcgcccgtgaagacgcggcgcatgactaatggagggatttagcaacatggagcgtaagttaatcggagtcgaccttggtgggacgacaactaagtttgccattttaacagaaaatggtgatattcaacaaaagtggagtattgaaaccacgattttagatgaaggggcccacattgtgcctaacatcatcgattccatcaaccaccacattgagttatataagatggaccgttctcaatttatcggaattggaatggggactcccgggaccgttgatttggataatggtacggttatcggtgcctacaacttaaactggaagaccttacaaccagttaaggctcaaatcgaaaagggaactggcatcaaatttacgctggataacgacgctaacgttgctgcacttggcgaacgttggaagggcgctggcgaaaacggtagtgacgttgtctttgtaacgcttggaactggtgttggcggtgggatcatcgccgatggccgtttactccatggtattgccggtggtgccggtgaaattggtcacgtaacggttgaaccaaacggctacatgtgtacttgtggtaagaaaggttgtttggaacaatacgcttctgcaactggtgtcgttcacgttgctcgcgatatggcagaagaattctctggtgcttctaagttgaaacaattattagacaacggtgaagaaattagttcaaagatcactttcgatttagctaaagaaggcgatgtcttggctaaacgcgttgttgatcgggtttcttattacttaggcttggcattagctaatgtcgggaacacgatgaacccatcttcaatcattatcggtggtggggtttcagctgctggtgatttcttattagatcaagtcatcagttactttaaccaattcacattcccaacgattcgcgacacgactgctttgaagttagcggtcttaggtaacgacgctggtgttatcggagcaggttcattggcccaacggtttatttaagttaaaatcaatcgtcaagaagcttggaagtaatgtccgagcttcttttttatactaagctccaaaaactgtgctgattaggttgtggttaaaaactgagcgccaattgccgatgctgatttgggctcatgtcctcagactatgcgcgattttagtttcatgtcggtatgctgttgtaacggcgtatgaactgttatgcgatttggcacaagggatacggatcgactagcgtgaattgaattagatgacagaattgattggagaagcaggatggtaaagttattattgtcttcacgggcgtttagcactgtggccgtaacggacgcctttttcactttagtggcgccggtggctaagaacagtgcgagaattgtgattattgtcaattcggtcagcacgggtaaaaatcacccccaaatggtggcactacaacaaacggttcagcagcttggatatgcgcacgtgcagctcctagatgtattgacggatgatttggccgcattgaatacggcaacggtcattattttgaatggtggctacgagtttttactgttgaagaatctgcgtgaaacgcacgtgctggaacgactgaggactctcgcgctggcgggcaagccaatctacggtattagcgcaggggctatcttgttaggcccggatttagacctgtacgcctatttatacccggaggacaacaccgagcaactggtaagcacaacagccatcaatgcgacgacgatccgtatttatccgcattatgatgttcattgtgaagtaaagccgcaattgccgcagttgatcaccgactgggaacataagacgggcgttatggtcaaacggttgactaacaatcagggattactggtacatggtagtcagattcagatgatcgattcggattcataaatgtgataccgcgatgcttggttttgaattaacagcgtggttagatgcgggtctcaggcccccgaccgttttaatggatgcctttaaaccgtgggtgagtacggccataaagcaatcggtgggacttcaggattagtcagcagtttaatcgcggcttttcctgcttacccctagtaaaagtaagcggttttgtgtaaaatagataagtagaaattaggagggataacgtggttttaggtgcattgagcggcatggcgtatgttaacatcgtgttagttatcataatcgcggcctactttatttatgagttgtatagttacattcgacggcgtcaggtgtccacgatgttggacgaagaagcgtttcaggcgggaatgcgtaaggcacaagtgattgatttgcgtgaaaagaaagagtttgacgctggtcatattctgggggctcggaatattccgttcaacagtttgaaagttcggatgaacgaacttcgcaaggatatgccaatctacgtttacgatcaaacccatacgttaagtacacgggccgtcgtcatattagctaagaatggttattcacagctatacattttaaaacccggttacgcacgttgggaaggtaagacgaaaaaagcgaagtattaaaaaatggcggctagaacaacaacttgttcggccaccattttttatttaattaaccgttgtgagctgagcgactcttgcgcatcgcctttttccggttttcttcgaatttgttttcttggtcttcgattggatcaacaacttgcttcttaaatgataagacggagccaattacggcaccagcagttgcgacgaccccaaacaagaagccacgggtaaatgatttcattagtaaaacctcctagcaattgttagttttattatgcttgttttatgcggagatagcaatcaattcaatctaatttttaaaaaagtggggtgaaacgcaatgcttactcaaattattgctcatcgtggtagcaaggggaccaggccggaaaatacgttaccagcgtttattgcggctatcgaggatggtgcggatggcattgagactgacgtacacttgtcgcgagacgggcaactgattattatgcatgatgagctcgtcgaccgcacgactaacggaacgggtcggattgtggatcacacgttggacgagttaaagcaattggacgctggtgttaagtatgcatcagcctatgcgggaacgcgtattccgactttagatgaagtggttcaattattgattcaatacaactttactggtatttttaatctggaaatcaaaactaataagattcattatgaggggatcgaagacttggtagcggattattttaaccatcatcaagttccgtttacgctaatttattcgagcttctacggaaagtcgatcgaacggttgcatgttttacagcccgaagtcgaatcggatagcctgttcaagactaaggttcaaactgcgaagcggcttcatgcgcaacacattgttctcggttatcatccggatattcgttgggtgcgagttcactggctcttattgccaaaagtgcagttgcggccatggacggtcaacacggaacgcgatatgcggttctgttatcgtcatcggtttgtgggactgattaccgactaccctggattagcacgaagaattcgtaagcaggtacaaggaggttaaacgagtgacaacagtaactaaacataaagtattactaatcgcgggaccaacagcagtcggtaagacggcattatcgctagcgctggctaaacagctgaatggtgaaatcatttcaggagactcaatgcaggtctatcgtcacttggatattggtacggctaaaataatgccggaagagcaggcgggcattccccaccatctaatcgatatcaaaaatattgatcagcgttttacagtcgctgaatttgtcagtcggacgacggcgttgatcattgatattagtgctcggggtaaactgcctattattgtgggtggaactggcttttacttgcagtccttgttggcgggctatcagtttggaccagcggataatgaaccggatatggcgtatcgtcaagcctggtttgatcgtgccgctgtcgaaggttcggatgtggcgtggatggcgttgaaacagcgtgatccgcaggcggccaccgcaattgcgcccgctaacttggtacgggtcgtacgggcgttggagtacgtgcatacaactggtcagcttttttctgagcaggcggatacgcacggtgacacactggatgcttataccttatgtctgaccgcggagcgagcgctgctgtatactcggatcaatcaacgtgtcgatcaaatggtagcggccggattggaacaagaggcgcggtggctatttgaccaaggtggcgccatgttaccggctggtaaggggatcgggtatcacgaatggttcccttactttaatggggagcagacgcgtgacgaatcaattgctaagatcaaacaggactcacgtcgttatgcgaagcgtcagttgacttggttccgtaacaagatgtcggtcgactggatcaatctattggaacaccctgaattacgggcctcgattgaccaacggctagctagttggttaagctaaattataaattggtatacctatgataaaacgtgtgatattttctaacatgaatgattgacattcgatgataacattgctaatattaagtctgtattaaagaggagggtcgttatgaaggaaaaggaactccgtcgctcgttggccgtcttgccaattggtacggttatgaagctgaccaatttgtctgcgcggcaaattcgctactatgaagagcaagaattgattacgccggaacgaaatgccggtaatcggcgaatgttttcgttgaatgatgttgatcgtttgcttgaaatcaaggattacttagcagatggcatcaatatggctggaatcaaagaaatatatgcgctccaaaaacagcgagctgagcagaagcaagctgacttggctaagccgctaactgatcgcgatgtgcgccgaatccttcatgatgaattcctgaatctcggaggcttgcagtccgacaagggccccaattatccggcacactaagatgtttgcattcgttagtcaatcaatttaaggagcgattttcatggcaaaacagtcctactcaaaagacgatatccgccgcatcgtcaaagaagaaaacgttaattttttacggttaatgtttactgatctattcggcacaattaagaacgttgaagttccagtttcacaactcgacaaactcttggataacaagttgatgtttgacggttcatccatcgatgggtttgttcggatcgaagaaagtgacatgtacctgtatcctgacttatcaacttggttgatcatgccttggaacacggaacatggtaaaattgcacggattatctgtgaagtttacacgtctgaccgtaagccgttcgaaggggatccacggaacaacttaattcgtgtcttaaacgatatgcgcgaagcaggttatacgtcatttaactgtgggactgagcctgaattcttcttattcaagatgaatgaaaagggtgaaccaacgaccgaattgaatgataagggaagttacttcgacttatcaccaatggacttgggtgaaaattgccgccgggacattgcacttgaacttgaacgacttggttttaacgttgaagccagccatcatgaagttgcacctggtcaacatgaaattgactttaagtacgcggatgctttatctgcagccgatcatatccaaacgttcaaattggtcgttaagaccatcgcacggaaatacaatttgtgggcaacctttatgcctaagccgttaaacggtgtcaatggttctgggatgcatgtgaacatgtccttgttccatgatcaaggcaatgccttttatgatgctaatgataagaatggcttagaattatcatcagacgcttatcacttcttaggtggtttgatgaagcatgcccggtcatacactgctgtcactaacccgacagtcaactcatacaaacgcttagttcctggatatgaagcgcccgtttacgtggcctggtcagcatctaaccggtcaccaatgattcggattccaagtgcacggggcttgtcaacgcgccttgaattacggagtgtggacgcttcaactaacccatatttggcctttgcagcggttcttgaagctggcttggacggaatcaagaacggtattgaaccaccaaagagtgttgatcgtaatatctatgttatggatgaagatgaacgggctgcagctggtatcgctgacttaccgtcaacgttacacaatgcgctgaaagagttccagacagatccgacgatgaagaaggcgttagggccacatatttatcagagtttcttggaagctaaacggcttgaatgggcttcataccgtcaacaagttagtgaatgggaacgtgatcagtacatggaattgtactaaaccattaattgagataaaaatacgacggttagggcaccttaaatggcgaactagccgtttttgttataaaattggtaaattagtggtgttaacctttattaatgcactaattttcggtaacattaggaacagcaatgcaattcagcaagttttcaattattattgattgcaaggagattattatggaaaaacaaaatcagcctgatcttgaaaaacaagatcaacctacgcgcgcgcttacgaagcgacttcaacaaaagttagactatgtaactacggtgcgccaagcaattacggctggtgacgaccggttgatctacgaattgatcgatggtgaccactatcaccaagccttacttaacgaggaaccggatccaacccgtaacgcccaagtggatttaattacggatgtctatccggcaatcagtcactacttgagtaccaagttaattgattatttggctcatgagtacccattcttttattatgaagaaacccaactcggcgaatttcagatttactttggtaactggtgggatcggcgccggtttggtaaattgaacgttttgaaagtcgcctttgaatttagttcggaagaatacaataaattacaaaagacgtttgaactggctcccgcgcacaaacgtttcaatacagatcgtattcagcagatctcagctggtagcgatcagctacagaaactgattgacgcgcaatcagaccgtgatgcgcaaaaagaagaattgcggcagcaactaaaggaaaatgggcaacgtaactcactatttgattctggtcggatcaaagaagaacggcagcaaattattgaccagttaactaagttggccgatgaagacgaacaagctaataatgcccatgcaaccatgaaggataacgaagctaagattttaacgctttctaaggaagatacgattttagcttatgagaaacaagcgattgaaaacgcctttaagagttttgagaattttaatgagcgtaaccgtagtctttatgttgactacttgaccacgctgattgggaaggcgcaggtagcggctgatggcgaataatacggacaagcagatggacacggcaacactgagcactcacggtaagctgagtacgttcaatgagggcttaaaaaaaggactcgctaatggtgaaaaatttacggccttgatggaccaactgattgatacaactgacggagagacactgttagcagcggcacaacagctagcagactttaaactggatacggcttacgtgacgtttccccatcaatatcagaatgccgattattatttgatcttcatgagtcggttattgggcatgcatggtgatgaacaagcggtgctgaattctcaacggcatactgaagcgctgtatcacgtttacggggcgctaacggatgattacaccttcttgtatcaagtggtgaacaacggcaacggtggtgcatattatcgtgaacaaacaactggcgaaaacttgttttatattcatttagaacggcgcttgttacggtttaatagttcggcgtttacgaatttatttattaataaattattgttgaaggggactggggttgaccaaattaatacggttctcgcaacgctaattaaatttggacattgcttacaagatgattttggctttaacgtcgactttaatattttggacgttgctaacgcggctaaatatgaactgcggtcggctaatttagatcgggcaatcgttgacaaattgtttgtcagtgcggctaagaatgagcacatgttgcgtaattcacagcaaggacatggtgcccaaattgaactgcgggctggtttgacagttgatatctttgatgcagctgaagctggcggtagtcaacaatgggtcctgactgttcatgatcctgatcaagcagtttcgtggtttgacgtgttgttacactttgggttcatgcgtgattggtacttagaaaatatcgattcgctagaaataaaagcggatccattagtatttgcttaagtaacgggggtattagatgttagaactaacaacgttattacaacagtcgattcgtttagaccgcgatattacggcccgtcaacagattcattggcggccacaagaacggttgcaaaatgcgatggtctcactggacgtcgaattggcagaaatggctaatacgtcggaatggttcaaagtttggaagattcatcgtggcaaagcggatcctgataagacacaccgcgaaacgctgctgaacgaatacgtagatgcgatggacttcttcttccttgtctcagcgattcaacagtggacgcatttgattccagtaacgcctgagcaattgactacgattgcggctaagccggcgactgatttgaataaacagtacttggcgatcaagcacctcctctatgatgcttactttaaccatcgtcaggagagctaccagcacgcttggcacgttttcttgaagattgggctagttgattttggttttactcaggacgagatacaaacggcgtttacggccaaaaatcatgtcaatgagcaacgacaagcaaataactattaaaaaaataacctaattgcgcgatttgatcacgtaactaggttatttttttaagcctctgtcattaattgcgcgtcgttatcggcgtcttgtgcaactaagtcattaacttggtcgatcaatgtttgtcgttgatcaagatcatcgtcgcattcaaagaaggccccgagttcctcagctaaagtatctttgtccgcatccatataccgaaagtcattgctggtgatcgtatagtgctggtgatctggcatccggacgatgacacaaccagtggctgactttcccttggtggctttgtccgtaaactcgaccgcgagtacgtagggcccgtcagttgaacgatctttgatggcatgcgcgatatttccggcaattgcttcaagtttcaatatgtttcacctcaaaacatattatacgcactattaggatgggatgcgagaattgatttagtccatcagctgctcggccagccgcttctgttcagcgtagaaagcgttaaaggcatggtgggcgttgatgactaggtggtaatggtgctgtgcgactaataagttatgatgaaattcaaaggtgtcacgcccttgctgaataaacgttaagtaatcgttcagataaatgttactggttaagccatggcgtaaaagcattgttgattcccccagacagtattagatacgttgattgtactacaccaaggttgtggtggattggacggtgtcttgattgtaaattggtattataaacgacgactgttacaattttgatattttcagtttgtcttccaccaaattaattggatagaatgcaatttttaggtaatagggtgatattgtccaatgcggcaaatgctctttcactcatacaagctgtgaacctaatacttttgtttttttatgtggatgctcagtttaggtagttgttgacctttttaatatctatgccgttaattggctgatttaataagcacgaatacgatttggctgccgaaatttattagaaaccaaaaatagagaagtttgctaaatgttggtttaacaagcttctctattttaaaatggcaggtccgaatcgatggtatgtcacgagtgagacttgaactcacaaccctccgcttagaaggcggatgctctatccagttgagctaccgtgacaacaacaagattaattatagttaagaagctggagagtgtcaatttttatttaatttttcaccgatgtgcagcagttaaaaaaggcgtgagtaagcagaatgatgtaaaaatgtaatatttgtaatgaaaaagcactaaattacagtaagcacattttgctgagataattggtcattatggtgaaagtcaaaaatgaagttagcctggtgaacgaggaaattgttttcatgaataccaattaatgcttgaagaacgacacaatataaacgctgtaatagcggtaactaagtccggtcatcattaatttaatttttgcaagacggggttgttaaatggcgacggcgaagaaccaatatctcctaaaatacttaagaaaagataaagaaattaacaaaactgactaaaatagtttatttcgcttgaaatgttactgtaacaaaacgataataatcatgtaacaaggaaggagaattcttatgggttcagtatttgcaatcgtcggtatcatcgccatcgctggtggcattcaatattattcaaactttgttgccaaagaaaatgcaagcagtaagcatttcactgcttcccgtaatgaccgttagtcaacgggagttcttatcttgcacattggcattatacaatcaatcaattaaaaaagaactgctcattcaagatgagcagttcttttttaattacttaatttttggtgttttttcgatggtgtcagtcttgccggcagcccaacgttggatagcagcaacttctttttcgcgacgaatgcgcttttgcttcccagcaactggccgacgtgatgcccatgtgttatatggttttgcaacaacagtcataagagtatgtccctcctttgattagtccaataacgactatattaaacaagaatagtgtacattgcaaccgaattaacaggaaaagccagacttttcccaaaaattgcattattagtataacggttattttggtcggttgtcaagataaaatcctttacagcgtttctaaagatcaatttagctttgaattgatgctaaggcatgtaaggactaaccagctagtatgatagtggcaggtaggtgagccccatatcaatcatgtgtcagtcgaatgaatgggccagatagatcactgagaaccatcttagacgtaatctaactatttgtccggctgattatcatctgttagacgctcttagtaattaatgttatattaattatgaaatgaaagtagggagcagatatgagtcatgaagttgatccgcgtgtcgataaaactcggcggcgcttgcgacaagcattaattacactattacagacagaaacagtcgataacatttccgtacaaaaactgactagtacggcagcagttacccgcggaacattttatctccactataaagacaagccagcatttgttgatcaggccctagatgacttggtaagtgaattgtttgaaacggccatcgtgacggtttcagtgggtgatattatgaccaatccggttgacccgttacagcgggtgcatgttttttccttatcaaaggcactcggttacatcagtcagcacgcggaagcctttgagacgctattgttagatcagcgccagttagcggtcaatcaacggatcaatcagcagatgacgacgtggatgacgaaatttcaccgtgattttcaggatcaatttgctgatttggaagtaccggtcagcattcaaatcgcgtattacgtttctgcgacagtcggcctgattactgattggttagctaatgatatgatctacacgccacattacttaaccaagtgtattaaaaaaatgcaccatttgatgacggtagggagcattagtttcacggacttttttgtgaagtgaaatcaatccttgactattatgaaaaaatttgataatattttcctgttgtatttgtggacttctacagctacaaccgcacggattgagtcttaagttcagcaatggcacttacattcggcgagtctaagtgatttataatttaaggaggtgcacaaacgtgtacgcaattattgtaactggtggtaaacaatataaagttgaagcaggccaagcaatttacgttgaaaaacttgacgctgctgctggcgacaaggttacttttgatcaagtagtctttgttggtggtgacacaactaaggttggaacgccgactgttgatggtgcgacggttgaaggtactgttgaaaagcaaggccgtgaccgtaaagtggttactttcaagtacaaggccaagaagggccaacatactaagaagggtcatcgccaaccatacactaaggtaacgatcgacacaattaatgcataattaagaaagtaggcattctttatgattcaggcaaccatttctcgtaatgcgaccggtcaagtgaccgcttttaagttgacgggacatgctgattcaggtgcttatggacaagacatcgtttgtgcagcggtttcggtgttagcaattagtacaatcaatgggattgaacaagttgcccgcttgcaacccgtagtacaaagtgatgaaaccaatggtgggctattaattgcagatttcactaagctggacttggcgaacacacaattacaaaccttacttgaaagtttcacacttggtttgaacgatgtggccacgaattacggagattacatccgagttcgtgaacaaacacgataaccacattcggaggtggactttactatgttaatgaacttgcaattcttctctcaccataaaggtggcggttcaactgccaacggtcgggattcagctggtcggcgtttaggcgctaagcgggctgacggccaaactgttaagaatggtaacattctttatcgtcaacgcggaacccatatttacccaggtgtaaacgttggccgtggtggcgacgatacattatttgcaatggctgacggtgtcgttcgttttgaacgcaaaggtcgcgacaagcgccaagtatctgtttacccagcaaaataatttttgaagagcctctgcagggaggctctttttttgtgaagcaatctagggatacccgcgactattattggttcacgggccgcttagccgtaaacgtaattgattgacgaatggccttcaataaatcattaccttcagtttttggaaagtttggtataatgaagcgtgaggtaatgatgggagtgacgaaataatgagtcgagttgaacggttacaaaataagtttgatcagttaaaaattgatgcgttcttagtttcagatggggctaaccttcaatatttaacaggaatggctgatatggccggcgatggttatctgctagtactggcacaggaagcctatctgattacggatgcccgttatcagacggcttttgccggtcagtatgatgaccagcacctagtcattacacgtgattatctgggggccgtttgtgatattattgccaaaaccggtactggggtcatgggcttcgaggccgagattccatatacagcctacagttacttagatgagaacttggtcagtgatttggttgcgttaccagacgtggtcgatgagttgcgcatcaccaagagtgttgatgagattgaccggctacgagcgagtgcacgtttggcggatgctggtttcgaatacgtaacgagtatcgtgcgaccaggcatgcgtgaaatcgacgttagcaacctgttagacgcgtttatgcggacgcacggtgcaagtgggccgtcgttcacgacaatcgtacttggtggtgcacgagcggctttaccgcatgggacggcttctaaagcgctcttaactgccgggcaacttgttactcttgattttggttactttttggacgggtacacgtcagatatgacacggacgtttgctttaggtactccggatgacaagttggttacggcctaccaggcggtgcaggctgctcaacaggctgtgatcgatcaggtccaagcaggtgcagccactgctcaactggatgcagttggccgcgatttgctgacaaaagcgggctatggtgacgccttcaatcatggtatgggtcacggcattggtcttgccattcatgaaggcccgttgatctcaaaaaacacgactggcaccttagttgcaaacagtgtgattactgttgaacccggggtatatttcccagatttaggcggaatgcggatcgaagatgatgtcttagtgactgctgagggccatgaacgactgacgactgcaactcgtgatttactgattttatagttaagacagttgccacagcggctcggtcttgttatagttataaagatatatttgaggaggatttttaaaaatgatttcaactgcagattttaaaaatggtttgacgattgaagtagacaacgcaatttggcgcatcgtggaattccagcacgttaagcctggtaagggtggcgcgtttgttcgttcaaagcttaagaacttacggacaggagccgttcaagacaagactttccgtgccggtgcgcggatggaacaagcgccaattgaaaagagtacgatgcaatacctttatgccgatggtgacagctatgtcttcatgaatacggaaacttatgaacaaattgaaattcctggcgaccacattcaagacgaattgaagttcttgaaggaaaacatggaagttcaagtaacgctttataagggtgaagtgttgggaatcgatttgccaaacacggttactttggaagttgctgaaactgaaccagggattaagggtgataccgcttccggtggctccaagccagctacgttggaaactggtgcaattattcaggtaccattcttcgttaaggccggtgacaagctgatcgttaacaccgttgactccacttacgtttcacgggcttaatttttagaaaaactaataccggcaaacatggaattggaggaatgtcaaaatggctgacagtagcaatattacgttacaaagcaaagaacccagcttaggacaaattcaaattgcaccagaagtgcttgaaataatcgttggtatcgcggtaagtcaaattgatggcgttaaccggatgcaagggacgatttcttccagtgtaaatgagttgttcggtcgcaagaagaatcttggtaagggtgtcaagttaacaatcgtcgatgatcagattagtgttgatgtgttcgcatacttggactatggtgtttcggtaccaaaagtcgctttagcgattcaagataaggtcaagcaacaaatcttatttatgaccgacctcgccttaagtgaagtcaatgtccacatcactggtatcgtgactgagaagactgaaagtgccattgatccaaacaacttgtttggtgatgaagatacccagaccgatgaaaatgaagatggtgaagaatcgtgagtttaacgcgtcatgaaatccgggaaaaagcatttcaagctttattcgcgttgaatgctaacccagacgctgatgaaaatcagttgttccaacagttactcaaccctgaagaagcggatgcagttgaaattcccgcatatttaagtacgttagtaactggtgttcgtgaacatcaagctgaattagacgctcaaattcagccttatttaagtcagaagtggtcgttgaaccgactggctaagaccgatttgattatcttacgcatcgcgttctttgaattgcaatttgttgacgacgttccagctaaggtcgcggttaatgaagcaattgaattgacaaaggcgttcagtgatgaccgctctcggaaattcgttagcggggtgcttggtaaagtggttaaaaaccaagccaattagtctaaaaccgaacaatcttatgttctaccgtaaaagtctggcgatttgccagactttttttaataacttattagtaaaccggtcataaatcattgtggtgatatgctaaaataagaccagacagagaaagaggagtgtggcacttgtgacgaagattattgatggtaaggcagtagctaagaaagttaacgcgcagacggcaacggcagtagcggaattggctgctcagggaattcaaccagggattgctgtaattattgttggggacgatgcagccagtcaaatctatgttcgaaataagaatcgtaaagccactaagttggggatgcactccgtggtgcggcagttgccagcgactactagtcaggacgaactgttagccattattgcggcatacaatgcggatgacagcattcatggcatcttggtgcagtcgccactaccagcccaaattaatgaaccattgatcacgatggccattgatcctaaaaaggacgtcgatggttttcacccgacgaacgttggtaagttgatcaccaattttccaggtaattatcctgtagcaaatacgcctcgcggtattatgacgatgttggctgactatggggttgatccggctggtaaaacggcggttgttattggtcggagtaccattgttggtaagccgatggccgctttgttaacaaatgctaacgcaactgtaacgattgcacatagtaaaacagctgacctaaaggcggtcgcccggacggcggatatcttggtggttgcaacggggattgcacacctgatcactggtgctgatatcaaaccaggcgcgacggtcattgatgttggcatggatcgtgatgaaaatggtaaactagtgggtgacgtcgattttgattctgctcaaggcatcgcagggttgattacgcccgttcctggtggtgtgggtccaatgacgattgccaccttgatgcagacaacggtggaacttgcaaagtggagtgatgtaagtgagtgaaagtcaacaatatttgacagtgacagctttaactcagtatttaaaacgtaaattcgaggttgatccatatttaggtaaagtgtacctaacgggggaagtttctaattatcgtccccggcctaatacgcatcaatatttcagtttgaaagatgaccatgccaagatttcagccattatgttcaagtcggcgtttgccaaggtcaaatttcagcctgaagaaggtatgaaggttctggtcgtgggccggattggtctgtatgagcccagtggtagttaccagatttatgtggaacgcatggaaccagacggcgtgggtgcgttgtatcaagcctacgaacaacttaaaaagaaattagcggctgagggcttgtttagtgcacccaaaaagccgcttccgcgctttccaaggcgaattgcagtggtcactagtcgcagtggcgcagtgattcgcgatattatcacgactactcggcgccgttttccgattgcgcagatcgttttgtttccatctcaagttcaaggtgatgcggctgcggccgaaattagtcggcagatcgaacgtgccaatgcgcaaggtgattttgatacattaattattgggcgtggtggtggttcaatcgaagatctgtggccattcaacgaagaagtggttgcgcgtgcaatcgcacagagtcaactgccagttatttcatccgtggggcatgaaacggatacgacaattgctgacttggtcgcagatgtgcgggcggccaccccaactgcggctgccgaattagcggtaccagtatataacgatgttttattacaattaaagcaagaccagacccgcgtgttcaatgcatttcagaatttcgttcaacgcgatcgacaacgacttaataaattacaaacgtcgtacgtgtttactcagccgaaccgcttgtacgaagggtatttgcagaagttagacttcttaaatgagcgacttaaacaggctggtcaaaataactttaatctggcaagccagcactaccagcgtgtttttcaacaattacgacagcaaacgccgattcaccaagttcgccaggcacaaacgcaactgcttaacttgcagcaacggctgaatcggggtacccagttagtcgtgcggcaaaaacggcagcaactgacgcagaccgtccaatcgttggatctacttagtccgcttaaaatcatgacgcgtggttacgcctttgtgacggcggatgaacaggtggttcacggggtcaaacaattgcagccagaacaaacggttgcaattcacatggctgatggtgaggctcaggcacagattacgaagattgatggaggaaaataatggctgaacaaccaacttttgaacagaatttatcacaattagagacgatcgtaaaccaattagagcagggtgatgttcctttagaacaagccttggatcaatttcaaaagggcgtggcacttagcaagcagttgcaagcaacccttgaaggtgctgaaaagacgctcactaagatgatgaatgaaaatggcgacgaagttccatttgagcaagctgacgccaatgaataagcaattattaactgaatttgaatccaagtggcgtcctcagattaatcagtatttagatgagcagcttcaagcgtgttctgaccaatcaaccctgactgacgccatgcgttattcggtactagcaggtggcaaacggttacggccgttattgacgttagccattttagatacttttgatatcacaacgacggctgcaaacttgcgggcaagtgtggccgttgagttgatgcatacttattcgctaattcacgatgatttaccggcgatggataatgatcagctacgacgtggcgaaccgactaaccatgttaagtttggggaagacgttgccattcttgcaggggatgctttacaaccgttgactttcgaatggattgtggatagtgggttaccggcatcgatcgtcgctaatcaaaccttagcattagcgcaggccaccggacctcgcgggatggtggctggtcaaattgctgatgtccttggagcgggacaacatctggctttgccagccttacaacagctgcatcgcgagaagacgggggcgttaattcactacgctgtccaggcagggttgattcaagctcaagtgcaaccagccgtgcaggaattgctattacaatatgctgatgcctatggattggcgtttcaaatttacgatgatattttagacgtgacgagtacgcctgctcagttaggaaaagctacgcataaggatgccgatgagcataagaatacgtatccaggtttgctggggcttgcaggcgcacgaacagcgttagaacaagcggtaacagctgctcaaacggcgttagtaaaagctagtgctgctagtcaacgaggcatgggcttgcttgcagcttttctaacgtattttacagattaaggacttaaatttagatggaaaaagaacgagttgacgtattattagtacaacaaggattatttgatacccgcgaaaaggctaagcgtgccgtaatggccggtgaaatcttaggtgtcaacgaagaacgcttagataagccgggcatgaagatcccagtggcaactgaattacatttgaaaggcaaaccgatgccctacgtttcacgtggcggtctcaaacttgaaaaagcactcaaaagttttgaaattgacgtgaccgacaaaacggtcctagatattggctcgtcgactggtggttttaccgacgtggttttacaaaatggggcaaaaatgagttacgccttggacgtcggtagtaatcagttggtctggaagttacgccaagatccgcgcgtggttgtgatggaacatactaactttcggtatagtaaactggcagatttcacgcaggggcaacctaactttgcgtccatcgacgtttcatttatttcactacacttaattttgcccccattacacgcgattattgaaaacggtggttcagtcgttgccctaatcaagccacaatttgaggctggtcgtgagaatgtcggcaaacacggaattgtccgtgatcctgctgttcatcaggcggtgttgacagatatcgtggaatttgcgcaagcgaatggttataacgttctagggcttgattattcaccaatcaagggtggtgaaggtaatattgagtttctaattcatctacaagctaccgatgaaacaccacggattgcgccgactgtgtcgattgaaaaaactcaggcggccgcttatgaacaattaaatcaagcttaaaattgaaatccggactttcatatttatgcattttggcttatgatgtgtttaaataagtatgaatagctaccgggggtgatcgggtgaagaagcaagagcgccaacgctacattaaacgattattgagttcgaacgaaattgaacgtcaagaagactttgtcaagctgttacgtgctgaagatattgacgtgacacaggcaaccatttcgcgcgatattaaagatatgcagctggtcaaggttccctcggcaacgggcggttaccactatagtatgccagttcagaaacaaatggatacggagaaaaagctcaagcggacactgaaagatgcttatgtctcgtatgcgactcaggataaatttgtcctcatcaaggtgttgccgggtaacggaccagcactagcaacgttgattgaagcaatgcattatgacgaaatttttggaacgctaggcgatgatgctcacgttctgattatttgcaagtcgttagcgatgactttagagctacaacaaaaaattcaacgcttactgagtgatcactaattagtaagctatcttcgacctgctcacatgtgtgtcaggtcgctttttttcaaaattaactaacggatgctggtaaccaattgcttttaaggagggcttgcagtgttacaagaattatcaattacgaactttgcaattatcgaacacttagacattgcttttgaagccggcatgacggttttaactggtgagaccggtgctggtaagtcaattattattgatgcagtcggtttattagcgggtggccgcggctcggcagagtttattcggaccggtgctgataaagccgttttgcaaggcatgtttattttgccggctgacggcgtgacggcccaattgttggacgaagcggggatcgaacatgcggataataccgtcattctacagcgcgagattactaaaagtggccgtaatacatgtcgcatcaatggtatgctggtcaatacgacgactttgaaacagattggtgaaacaattgttgatattcatggtcagaatgaacatcaagagttgatgcaacctgaaaaacacctgggattgctggacgagtttgccgccgctaaaattcgtaaattgaagcagcgttaccagcaacagtatgatcgttatcagcagttaaaccttgaattacggcaaaagaatgcgaatgaaaaagagtgggctcaacgcttagatatgctgaactttcaagtggacgaaatcgcagcagcacaagtcaaagtgggtgaagaggccagcttgactgcggaacgtgaccgcttggataattaccaaatgatcaatcaagcgcttcaacagagttacacattgttagctgcaggcgaagagacgactggtgcggttgatatggtcggtacggcgatgaatgcactagaaccgattgccaatttggaccccgcctttaatgagattaccgtgaatgtcaagaatgccttttatgggctgcaggatgcggccggtcagatttctaatcagctcgatttgcaagaattcgacgagggtcgcttggatgaaatcgaacagcggctggacatcttggcccagttaaaacgtaagtatggggactctgaacaacaaatcttagattattaccaaaaaatcgcggctgagttagctaagatgactgactctgaagaaaatagtgaagatctggcccagcgggtcgccgacctgaaacaacaactacttacgacgggcgaagcgttgtccgataaacggcgggctgcggcgaaagtgttacaacgacagatccatcaagaactcaaagatctgtatatggataaggcaatctttgaagtacgattcaaaccgactaagggtcagatctatcggagtggtctggacagtgttgaattttatattcagactaatcctggcgagcgcatgcggccattggccaaaattgcgtctggtggggaactctcacggatgatgctggctttgaaaaccattttttctgaatcacagggaattaccagtatcatttttgacgaagttgatacgggtgttagcggtcgggtcgctcaagcgattgctgagaaaatcaacggcattgcacacttttcacaagtgctctgtattacccatttgccacaggttgcggcgatgagtgatcaccactacttcattgccaagaagattactggtaagcgcacgaaaacgagtgtgactaagctagataatgcggcccgggttcaagaattggcacgcatgctggcgggaactaaggtcactaagttatcgcttgagcatgcggaagagttattgcgactggccgatgaggaaaaagacgattaagtttaattgatcggtaccacaagggacggacaactatggtcggtccttttttgatggtgttaattagtgacgatggtgtcgagtgaggtttcggtattattgccaaggcgacgataattctttacaatataaaacgcaaatagacgaaatatgggtcaacggacacgttttaatgaactgtcgggctggttggtagtgggtggctaatctgaagctccgactaccaaaatataccgttaaaacgataaaatgttcagtttacatgtcatgacgtttgcattttgctttcgttataagttatgcttaattacagtacagtttattcggcaacgaaataaactgagtaaatgattggagtgatgaggttgtttctgacaatggaacatttgaataaaacgtatcctggtggcaaagtagccgttgaagattttaatttggaaatcgaaaaaggtgaatttgtttgtttcatcgggacgtctggttcaggtaaaacgaccacgatgcggatgattaatcggatgttaagtcagacttccggtaccattaaacttaatggtaaggatattagccagattgacccggttaaattacggcgacaaatcggttatgtgattcaaaacattgggctaatgccccatatgacgattcgagacaatatcactttggtaccacgattgctaaagtggccccaagataaaatgaatgaacgtgctaagaagatgatcaagctggtggaattgccagaagattacttggatcggtacccgtcggagctttccggtgggcaacaacaacggatcggggttgttcgggcgttagcagcagaccaagatttagtattgatggatgaaccatttggggcgttagacccgattacccgtgaatctttgcaagatctcgttaaggatttgcaggaacgcttaggtaagacgttcgtctttgtaacccatgatatggatgaggcgttaaaattagcgacccgaatcgtaatcatggatggtggcgacattatgcaagtggatacgccagacggtatcttacgtcatccagctaatgaattcgttgagaacttaattggtaaggatcgtttgattcaagcacggccaagtattaccactgttgggcaagtgatgttgaaagacccaattgccaccacaccaggaaagtcattgacggtcgcattacgacaaatgcatgataaacgcgttgactcgttgttagtcaccgatgaagccggcatcttgaagggtgtgatcggcattgaagacgttgattacaactttaactcggctactagtgtgggcgacattatgaagactgatttgttctatgttcagtcaaattcattgattcgggatacggtcgaacgtattttgaaacgcggcttgaagaacattccagtcgtagatgaacaacatcgcctggtcggaattgtaacgcgggccaccctggtcgatattgtttatgatgctctctggggtgatgaagacgaagatgaagctgaaaataatattcatcatggggaggacgatgcgcccgctgaaggcggtgaacaggcatgataactttcctacaaaactacggcatgcagctgctggttaagacgtggcaacacttgtatatttcggcgttttcattgttcttaggcattatcgtagcggttccgattggaattctgcttacgcgggtgaagccgattgcgaatgtggtcatgtcaatcgctagtatgttacaaacgatcccagcgatggcgttgttggcattgatgatcccgtttttcgggattggtgcaattccagctatcattgcgctgttcatctattctttattaccgattctccgcaatacctatcttggactggaagacgttgatccagccttgatcgatgcggctaagggaatgggaatgaccggttggcagtcaattgttaaagttgagttaccgatggcagccccagttattatggctggtattcgattatccgcaacgtacgttattgcctgggccgcgttagcatcatacattggtgccggtggccttggggactttatctttaatgggttaaacctctatcgaactgacttaattttaggcggttcaattccggtgattatcttagccctcatcgttgattggctgttgggtaaactagaagcagcggttaccccaagaaccacacaagcgtaagggggattaaagatgaagaaaattaaaaagtggttgttaggtgttttcgcaacggtcgccagtgcgttattattggccggctgtggctttccgggtttgtcaggaacttcatccgatacgatccggattgcgtcacaaaacacgactgaacaacaaatcatggcgtacatgattcaagatatgattaagcattattctaatttgaatacgacgatcattaacaatttaggttctgggacggttagtttcaatgccttgaagaatgatcaggctgatatttcagcgattcgttacactgggacggacttaacgacgattctgggcgaaaagatggatcggagtaatatcaagtcgattgaccaaaaagttcgctcacagttcaacagcaagtatcaaatgacctatttcccaagttatgggttcgcagatacctatgcttttatggtgacgaaagcgacggctaaaaaataccatctaaatacggttagtgatatgaaaaaagtagcctcgaagctgacggtcggtttggatcaaatctggactgaacgaaaaggtgacggttatcctgcctttaagaagttgtatggctttcaatttgggaagacttatccaatgcaaattggtttagtttatgatgccttggaatcaggtaaaatggatgccatcctcggatactcgactgatggtcggattggtagttatgatctgaagattttaaaggatgataagaatttcttcccaccatacaatgcgagtgcggttgcaacgaacaagatcttgaaagctcatccgaagttgaagccaatcttgaatcgattaaacggtaaaatcagcttaaagacgatgcaaaacttgaactatcaagttgataataacttagtggaaccggaagttgtggctaaacagttccttgaaaaacataattactttgaagggagtgacaaataatggctcagatgaacttgctgcaacagttgatatattattaccaacaaaacggtgtgtacgtgttaagccagttctcacgtcacttcttgatttcaatttatggcgtgctgtttgcggcaattgttgggattccaattggcattttcattgcccatcatagtcggttgagtgcgacagtgatcgcgattgccaatgtgattcaaacgattccgtcactagcgatgttatcaatcatcatgattggtttgggactaggtgtgaacacggtaatcgtcacggtctttttatacgcattgctaccgattatcaagaatacctatactggaatgcaaaatgtgagtgctagtattttagattccggtaaggggatggggatgacgcgttggcaactgttacgaatggtggagttgccactgtcactttccgtcattatggctggactccggaacgcattagtgttggctatcgggattacggccattgggaccttcgttggtgccggcggtttaggggatatcattattcgaggaaccaatgctacgaatggtggtgccattatcttggccggggcgttaccaacagctttaatggcaatcattgctgatacggtcttggcttggattgaaaagcgtgctgatccaactcaaaaataacgtcagtgagcgacaagtaaaagaagcaatataaaaattaagttactaaaaaagattgatttacaggtactccgtactcactcattcagggaagtcagtggagctgtaacatcaatctttttgatttgcatcaaaaacaccatgagaatacgcaaggttgtattgaacatgatttcaccttttgatgcaagtattaatgattaaactaaacgcgtttgatataacggatggcgtccgggtcgaccaagtgggtcaggtgtaactgccgattaactagaaccaactgaccactagcgaggttttttaacactccgtgaatattatatggtcgggactcagtgagctgaggctgcatctggagcatgatttgatagtgttccgtgtgcgcttgagctaagaacaaatcccgctggaaagccggcatcattggcagtaacggcgcaacgacggtcggggcagcagtaaagtcatccataaattggcgataggaagcgtgtaagttcttggaaattagtttcaaattagattgttgattttgcatattagccacctcgaacatttgtttgtgtttccattatacgaacaggcgttctaaaaagcaagcctaaaatttgagaaaattcacgaataaaaatgaaaaaaagctgtgtaaccttgataatacttgcaatatagggttaaaaagtgcaaaataaactttaaaacatattttaattaaggggaatttgtgatcatggcgaaacaaggcatgttaatcgtcttatcaggtccttcgggtgtcggtaaaggtaccgtccgcaaggaaatctttgactcagatgataacgattttcaatattcagtctcgatgacgacgcggcaaatgcgtccgggcgaagtagatggcaaggactactattttgtgtccaaagaagagttcgaggatgaaattaagagcggcggtatgcttgaatatgccaagtatgttgacaattactatgggacgcccttaaaatatattaagcagtcgttggcggctggcaaagacgttttcttagaaattgaagttaacggggccatgcaagtccgcgaaaaaatgcctgatggcgtcttcattttcttgacgccgccggatttgatggaattgaagcaccgcatcattggtcgtgggactgatgatatgagtgtgatcaacaagcggatggcaaaagcggttgatgaaatcaagatgatgcgtaattatgattatgcggttatcaatgatgaagttccgctagctgctgaacgaatcaaggctattattcgtagtgaacggtttagtgttaaacgggtcatgcccgagtatgaagaaatgttaggagatgcggaatcatgatcttatatccatcagttgatgacttactgaagcaagttaattcgcgttactcattgattatgttagctagcaagcgggcccatgaattggacgctggtgcagcaccaatgcttagcgaatacaaatcggttaaaacgattggtcgggccatggaagaaattgcggccggtgacttaatgatcgatccagatgaaactgacaaagattagtaacaaaacggtgtgctgagccagctggggcttggcactttttttatgaagaatgacgcggacgttcagcttcacgttactgtcgattcttgatacaattgttttattaaagtgtaaaaatctcgctggcacggttgcgagatttttcaaaggacgtgaagaagtgagtatatggacaaaacgccatgtaacggtagtcgttagtggtgggattgcgagttataaagcgttagtattgattcgtagtttgatgaaacagggcgccgtcgtgcgagttgcgatgacgacccatgcggcaaagtttatcacgccattgacctttcaaactttaacgcagcagccagtggtcattgatgaattcacaacgactgacccgcatcacgtcgtccacgtcgcgttagctgactggactgaagtgatgattctcgttccggctaccgccaacttgattgctaaggtggctaacggtctagccgatgatgccgcaacgacgacaattttagcgacgaccgcacccaagtttgtggtgccagcaatgaattcacatatgtacgctaatccagcaactcagcgcaatttgaagcagctgacgacggatgggttacacgtcttaactcctgctacgggtatgttggcggaaggctacagtggtcaaggacgcttgccggaaccagcggtgattttggcctggttgacagatcaactgattcagttgacacctgatttgccattagcaggacggcgagttgtcgtcactgccggcggaacccgagaagccttagatccggtacgatttatcacgaatcgttcatcggggaagatgggctacgcagttgctcaagtcgcacgggagttaggtgcaactgtgacactgatcagcgccacgactcatttagcagcgcctagtggtgttaaggtcgtgacggttgattcggctcaatccttattgacggcagtcagtgatatttttgatgatacggatatcttggtcatggcggcggccgtatctgattatcggccggctgaattagctgatcagaagattaaaaagccagctgaccatgctgacttaacgttacgattgacagaaacaccggatattttaaaaacgttagcggcccggaagcaccaacagtatgtgattggctttgcagctgaaactcaatcattgctggccaatgccaatcgtaagttaactagtaaaaaattagatttaattgttgctaacgatgtttccaaaccgggagttgggttcaatggtgataccaatcaggtcacactgttgcggcctgagcaacaaccagttacgacggaattgacaacgaaaactgcaattgccaaacagatcttgatgacggcaattgcggatggtgcaggaacacaggcatgattaagtagagaggaagagttgtgtggcacaaattgcccaagtattagtcgatgtgcccactatgcagacaaatcgaccttatagttatcgaattccaaccgcctggcaatcacaagtgcaacccggcatgcgcgtcgtggtgccgttcggccgtggtaaacggcgggtgcaggggtttgtgttagctcttgatgacgttactaactttgatggtgagctgaaaccaatcgacgcggtcgttgacctagcaccggttctgaatactgaagccttagcactgaccaagtggttggctgccagcacgttttcatttcagattacctgtgcacagaccatgctgccggcggtcatgcgtgcaaagtatgaaaaacagttgcgaacaacagcaacaacgcccgcgacgattcgaacgacgctgtttggggaccaatcgatggtgccgtttgatgacgtcgccacgacgccggcaatcgtcagccagttattacggctgcaggcggctgggcaagtcgatgtgtactaccaagttaaaaatcaagcacggcgtaaaacgcaaacggcggtgaaagcggccttaactaacgaagcgctacaggctgcagtggaccaggtacgcgccggggctacacaacaattggcggtgctccaggggttgctcactttaaatggtgaacagctctcgcaaaaggcgttttgtactcgttttgatgtcacggacggtgccattcgtacagcagtacagaaaggctggcttaaaaaagtggccgtcgaggtttatcgtgatccctacgcaactagtgatattaagactaccaaggcgttacaattgaatgatgaacagcaagtggccgtcgatcagattacgcaagccgttgaccaagccgcaaccaccacgttcttgttagagggtgtgacggggagcggtaagactgaggtgtacttgcaatcgatggcggccgcattggcacaaggaaaaacggcgttgatgttagtgccggagatttcactgacaccccaaatggttcaacgcgtgaaggggcgctttggtaaagctgttgccgttttgcacagtggattgtccagtggtgagaagtatgatgagtggcggcgaatccaacgaggtgaggctcaggtggtggttggcgcacgctcagcggtgtttgccccgctaaaaaatcttggcttaatcgtgatggatgaagaacatgagagcacgtataagcaggatgatgccccgcgttatcatgctcggcaagtggctttatggcgtagtcgttaccataactgtccagtcgtactgggttcggcgaccccatcgttagaaacgcgcgcccgcgcagaaaagggcgtttatcagcgcttactgcttgcggatcgggtcaatcgacggccccttcctaaggtttcaattattgatatgaaaaaggaaatgcaacaacacgctgaaagcaatttctcagcaccactgttagttgccttgcaggatcggcttgaacgtcatgagcagagtgttctaatgctcaatcggcggggctattcatcgtttgtgttgtgccgagattgtggttttgtcttgaagtgtcctaattgtgatatttcactcacgctacacatggatacgcacacgatgaagtgccattactgcggtcacgaagaagccattccgcggaattgtccgaactgtcatagtcgtcagatccgttattatgggacgggaactgaaaaagtcgaagaagaattgcaagacttgcttccggacgctaacattattcggatggacaatgatacgacccgtaaaaagggcgcccatgccaagcttttagcacagtttgggagtggtgaagctgatattttgattggtacccagatgattgcgaagggactggattttcctaatgtgaccttggtcggtgtcttgaatgccgatacggccctaggattgccggattttcgcgccagtgaacggaccttccaactattaacccaggtgagtggtcgagctggacgggcggaaaagagtggtcacgtgtatattcagacatttaatccggatcattatgcgattcggtttgcacaacaccacgattacgaaggctttttcaagtatgagatgcagatgcggcaccggggtggttatccgccgtactactttacggttcaaattacagcgagtgacttagatgaaggggtagcagccaagcgcatgtatcagttactgcaatggttacgcccgcggttggcaccgtcaacgattctattaggcccaacgcccaagccgatcgcacgagtcaatcgccgttattattatcaaatcgtgattaaatataaacaagaacccaatttagctcagacgctgacaacgctactgcatgagacgcaggcgcaacaacgacaagggctacagattggaattgacgtggaacccttacatttcatgtaatgggattaggaggaagtttgacaatgacatcaatcgtttttatgggaacgcccgcgtttgcggcaccgattctcgaaagtttaattaaagaacaataccaggtactaggcgttgtgacccagccagaccgaaaagttggtcgcaaacacgtcttaacagcttcgccagtcaaagaagtcgcggttgcccatgatattcccgtcttccaaccggaaaagattagtggtagtcctgaaatgcaacagattattgacttgcagcccgatttaattgtgacggccgcctttggacagtttttaccaacaaaattgttgaaagctgccaaaattggtgccgttaatgtccatggctcgttgttgcctaagtatcgtggtggcgcgcctgttcaatattcaattatcaacggtgagtctgaaactggaattactatcatttacatggttaaaaagatggatgcgggcgatatgctggcgcagcgtgcgattccaattgaaaaaaacgatgacaccgggacgatgtttgataagttgagcttagttggtcgcgacttgttactggaaacgttgcccaagttgattgctggcgaaattacggcggtgccacaggatgaatcccaagtgacctttgcaccgaacattcggccagaacaagaggttttagacttctttacaaaaacggccgttgaaattgataatcaagttcggggcatgcggccagcaccaatcgcctatgcggtcttggatggaaagcgcacgaagttctgggatgtgacccccttagctgacgaagtggtcacgcaagctcctggacaagtggttcgcaagacgaaacatgagcttgtgattgcagctgctgaccacacagcgattgcaatcaatcagttgcagccagctggtaaaccgaagatgacaattacagactatttaaatggggcggcagataagttcgctaccggagagcaggttattaataaatgagtacagttggtaataccccccgctggttagcggtcgccgccttagcgaagattaagaacggtgcatattcaaatttgcaattaaaccagttaatcaatgatcatcagatggatcggcgtgacattaatctgctgacaaatatggtttacggtgtcattcaacatcggttgactctcgaatactggttgaccccgtttgttcgacatccgcaccagattgacccctgggtacgggagctcttattgagcgcattgtatcaatggcagtatctggataagattccacaacgggccgttttcaacgaaacgattgaaattgctaaggtcaaaggtcaccctggcattcggcggtttgtaaccggcgtcttacatcaaatggatcgctcaggactaccgagttttgatgcgattaaagatcctgatgaacggttgagtgtgacttatagcatgccaatatggttgattcaagaattgcggcgtcaattaggtgctgaaaagatggagcgaatcttatcatcattgaaccaaccagctaagcaagccttacgtgtcaacccggccttgtcgacggttgaagatgtgacaacggcgctgattaatgatggtttgacaattacgccgagtgaaatctcaccgttagggctgattgcaacggatggtcaggccattaatactgaagcgatgcggtatggcatgttcacagttcaagatgaaagtgcacaattagttgtgccagcactcaatccgcagccgaatgatcgagtcttggatgcttgtgcggcccccgggggcaagacgacccagattgcggctagtttagatgctgagcagggtggcacagtcgttgcccttgatattcatgccaataaagtgaaactgatcggtcaaaatgcggcgcgcatgcacgttgctgatcgcgttgaggccaccgaactcgatgcccgtaaagttgagacgcagtttaatgctgaaagttttgatcgaattttagtcgatgctccgtgttcgggactgggattgatgcgccggaagcctgagattcgctatgagaaacagttgcaggatagtttgaacttgcaacgaattcagctggcaattttgacagcggtcgccccaaccttgaaaaaaggtggtatcatgacgtatagtacgtgcacgattttgcaacaggaaaatcaggatgtgattaccaaattcttagcggatcacccagattttgagctgcaaacaacgccaactgaacgagacttgaaaactgatcgaacggaaaagactttgtcgatttatcccgatgattatttatccgacggctttttcattgcttgtttgcgaaaaaaataatggtggagtggtaaacaatggattttgcataccggtcggatattggccaacaacgtgaagaaaatgaggactatgtcggcttttttcaaaataaagcgggcatcaattttgcaattgttgcggacggtattggtggccaccaggggggcgatgtcgcttccgagatggcagtctcgcacatgggttttcggtttgaaaatacaacattcaaggaacccaatgatgccgtcaagtggctagcaagtgaagttcaagatgaaaatcagcatattattgaaaaggcccgtgaattttcagatctaaacggcatgggtacgacaatggtcgccgctttgctttttgatcaaaagtttttgatggctaacattggtgatagtcggggctatctttttcgcgatgggcaactccaccaactgacggaggatcattctttagtcaatgagttggtcaagcgaggagagatttcagccgaacaggcccgacaacatccgcagaaaaatattattacgcggacactaggcatctcaccagatgcggatatcgatacgaacctttaccagatacaacctggggaccaattgttattatgttcagatgggctgacgaatatggtgactgaccaacagcttgcgacggttttggcaacgacgcagacttcgacccagaagtgtgagacgttgatcaaattagccaatgcagctggtggtaaggataacattacggcgctgctgatggcgcttgatggtgaggtggccagtaaatgacacccaactatacccttagcggacgatatcggatcgttcggtccttaggtgaaggtgggatggccaacgtttacttggcacatgacttaatattagatcgtgatgttgcggtcaaactgctccggttagacttacgtgatgatcctaagaccatcaagcgattccaacgtgaggcactggcaacgacggaacttgttcacccccacattgtcagtttgtacgatattggcgaagaaaatggcatgcaatacttggtcatggaatacgtcaaagggatggatcttaaaaattatattaaagagaactttccgttaccgttacagcaagtaatcgacatcatggagcagatattaagtgccgtggcaacggcccacgcgcataatattattcatcgggatttaaaaccacaaaatattttaattgatgagcagggcaatgctaaaatcactgatttcggcattgcggtcgcgttatctgaacataccatgacgcagactaacacgattttaggttcggtccattatttgtcaccggaacaggcccgcggtagcatggcgacaaaacaatcggatatctattcgttagggattattttatatgagatgttaacaggctcagttcctttcaagggtgagacggcagtttccattgcgttaaagcattttcaaaatgcaatgccatccgtgcgagagtttgatgcggatattccgcaggcacttgaaaacgtcgtcttgcaggcgacaacgaaagatccacgggaacgttatgctacggtcgaggacatggccgctgacttattgacggtgcttgctagtaaccgtgcgggcgaaaagcgctttgtaccgcaagatgtcggtaatgatgagactaagatcatgcccagtgcggatattcaagcagcaattgcggccaatcaagacggtaagacccaggtcgtggcgcataaaagcaagcaaccaacactccagcgcccggctgaaacgactgagagtcagacagatgctgatgaagaaccgttaccaacacgttcttggtccaaacgacatccgttgcggcgtcggctcctcttttggggcggtattattttgttattagtcgtggccgtgatcgtcggtttggaattaagtcggccacagatgacgacggtgccgaaagtaacgggcttaagtcagcgtgccgcaactaaggtcctcaaaaaacaccatctcacggtcgggactgttcaacatgctaaaagtaatcaggtagccaaaaatcaggtgatcaaatcaacgcccagtgttaagacgcgggtccaagaacgtgctcgcattaatttggttatcagtaacggtgccaaggttatgagctttggtaattatgtcaatgataattaccatgatgttcgacagacgcttaaatcggcgggattcaaagttaaggaaacttacagtacgtcgtcggttgcagcaggacaaatcatcagtcaggatgttgtcgctggtagtcgcgtgatgccgacagatacgacggtgacgtttacggtcagcgctggtagccgctacgtcgagctaaaagatttaactggtgagagcaagagcgatattctggactatgctgaggcaaatgatcttaatgttaactttaagcagggctactcttcggaacagaaggcaggttattcctatgatcaagatccagatggcggtggcaatgtccggactgggtcgactattacggtgaccatgtcaaggggcagtgataataacgtgacgacaccacagaatttttatgttaaactaacggtgccatacaaagcgttatcggccaccactgcccaggccaacgatgttaagatttatttgtatgatgatacccatatgattgagaccgtttatcgcgatattgcaatcatgcggtcgactaagattagtttaccgtttcagctgaccggtaatacgaaggggcattaccgaatcgtgcgtaacggggttacgatcatggaaaagaagaatattacaagcaaaaatgcaacaaaataaagataagtcatgcgcaatgcatgacttttttggtacaatagagaaaagtggaccgtaccaaataatataaaaggtggtgctaatttgaaaattggacaaattcggcaatcgctaagcggcttttatgacgtttatgctgatggccaaatgtatcggacccgtgcacgcgggaatttccggaagcggcggattacgccacttgtcggcgacaatgtggagtttgatgcggcgaccccacaagagggctacgtgttaaatattcttgatcgacagacccagttggtacggccgccagtggctaatgttgatttaggtatcgtggtaaccgctacaacggaacaagaattttcaacgaatttattggatcgacaactggtagctttggcagtggcaggtattgaaccattactctactttgcgaagactgatttactaaccgatgaggtgtaccaacaacgattaacattagcggacgcttatcggcagattggttaccaggtcatctgcgaacgaaccgcattttcaccggccgccttagccgcagttaaaacggctctggctggtcatgtggcggttgtcatgggccaaactggtgctggtaagtcaacactgctaaatcatttacaaccagggctggcgttagcgactggtgaaatctcgcaggcgctgaatcgtgggaaacatacgacccgtaaagtcagcttgatcccgattgcggatgggttggtcgctgatacgccgggtttctcatcctatgaagttttcgatattgccgctaacgagttgccccattattttccagagtttgtgcgacttagcgctgattgcaaataccgaggctgtgtgcatattaacgaaccgcaatgtgcggttaaacaggcattggcagctggggagctgttagcaagtcgctatgataattatttacaattctatgaaaccattaaaaataaaaaagtaatctataataagaaaaagtgagtgagactaatgattaaagttgccccttcaattttaagtgcagattttgcgaaccttcaacgtgacgttcagatggctgaaaatgccggtgccgatgcgttgcatattgacgtgatggatggtcagtttgtccccaacttgtcattcggaatgagtactgtggcggatttacggccagtaacgtcattaatgttagattgtcatttaatgattatggacccagagcggtttgttgggcagtttgcaaaggccggtgcagatttgattggtgtgcacgttgaaagtacccgtcacatttatcacgccttacaattaatcaaagatgctggtgtgaaagccgaagtggtcgtgaaccccggaacaccactcagcatgattagtgaattattgccactagtggatcaagttttgattatgaccgtcaatcctggttttggtggtcaacattttctggaccaaatggttgctaaaattgcggcgttgaacgaattgaagcaacaacacggttatcaatttgagattgaagttgatggtggaatcaacgaccagaccgtcaaggcgtgctatgacgctggtgctacggtcgctgttgctggttcgtatgtctatgacagtgcggacccagcgcaacgtattcaagatttgaaggtggcgaccaattaatggcaaccatcgtaaacttactggttggcggaccgaccgctaattatccagcagatttaacgacgattccaggaccatgggtcggcgctgaccgtggcgcgttgcgtttggtgaaacgtggtatccagcccgtgatggtcgtaggtgattttgattcaattgatgcggctgaactccagactgtcaaagatgcgttggtgggcgctgtcgttgtcaaacccgaccaagaccatacggatacacaattggcgattaaatccattttcgagcagttgcaaccggatgaagtgcatctatatggtgccacgggtggtcggttagaccatttactggccaatatgtggttagtacttgatccggtatttcgtcagtgggctccgcagatcaaactgattgataagcaaaattcggttcggttctttctaccaggggactaccagattacgaaggaagcggataaacgctatttggcgtttgtaccgctgatgccgatgcatctcacgttacccgatgagaagtatcagttggacgctgcttataatgcgtacccgatttcatgggccagtaacgaattcagtggcaatactggtcactttagctttgatgcgggggttctagctgttattcaaagtcgtgatgacagcatggcggatgcgtagggtacccaaaggtttcagctaaaataagaccggtcggtgagtcataaactcatcaaccggtcttttaatatgcagtaacgacgtatcatcggggagcttgttggtgaaacgtgctgatgtttaggtcggtggtcgttagtagacctaaccggaaagcttatgttgaagcagaactttttggtcagacccagctggttgtttccgacgatggtacggcaagcaccctcaatgattcaggtcatcataatgggctggtcaaggctgaattataaactttataaaaagttgacgagaaattagtaattttagacaacaaaaaacgccagccacaaaaaaatgtgctggcgatttgctgcgctaaacgcgcgtaactttacctgatttcaaagtccgagctgaaacccaaaccttctttggtttaccatcaactaaaatgcgaactttttgcaagttagctttccagctgcggcggctgtggtttaaagcgtgagaacgcgtgttaccaaagtgcgtccgtttgcctgtaacgtagtcttttgccatgttgatctgcctccttcggtaattcattgataaaaggtcgtctttatcattcactagaataatttatcatagattaataaaggttgcaatacatttctatcaagtaattttactttactgctaaattcccagtttccgggcttctgttaagcagtcgcttaatttttctttcaagagtggttgtgctatgataaactatcgtaaatgaacgcgttaaaacaaggaggctattttcatggctgtcaaaatcaaaacgcaatttggaaccattgatattgataatgatgttatcgcgacggtcgtcggtggcgccgcaacggataactacggggttgtcggtatggcgagtcggaaccagattcgtgataatgttaatgaaattttacgccgcgaaaactatgcgcgcggtgtggttgttcgccaagaggataatggggtggctattgatgtcaacattatcgtcagttatgggaccaaaatttcagaagtctcacgcaatgtccaagccaaggtcaaatataacttacaaaacatgcttggcgttacggccaattcggtcaacgtcattgtccaaggtgtccgggtaatgaacgactaaattgatgttggtggaagccaaggaggaattttgaaattgaaaatcaccacgattactaatcttgaatttggcaaaatggtgcaggctgcttcacaaaagctgaaccaacgtgctgaatttattaattctttgaacgtctttccggtaccagatggtgataccgggactaatatgagcttatcgatggccagcggtgccaaatatgaacgtgaagaaaccagtacaaaagtaggcgacctagcgtcagccttagccaagggactcttgatgggggcccgtggtaattctggtgtgattctatcacaaatttttcggggcttttctaaagccgtagcggataaggagagcttaaccgctaacgatttagcagccgccctcgcagccggtgctcagaccgcctacaaggccgttatgaagccgactgaaggaactatcctcactgtcatccgcaaagctgctggtgccggtaaggaagctgttaaaacgaccgatgatatttgtgaagttatggatgccgtcgttacggctgctgaagctgcattgaagtccacgccggacttgttacccgttttaaaacaagttggggttgttgattccggtggtcaggggctgaccttcgtgctggaagcctttagtgactcattaagcggcaaggtcgacgaatcacaggactatgttccggacgatgctgaaatggattcgatgattgatgctgcccaccatcaaagtgtgcaggggcaattagacccgaatgatatcaagtatggctactgtaccgaaattatggtgcgaatcggcgatggtaagttagttgatcacaagttcgactatgacactttctatgagtacttagcaaaattgggcgattcattacttgtcatcaacgatgatgaaatcgttaaggtgcacgttcatacggaacatcctggcgatgtcatgacgtggggccaacgttttggggcgttgatcaaagttaaagttgataatatgcgtctacaacaagaaaccatcatggaacatgataaggaagacgaagcgcaagccgctgctgagcccgccttaccttcacaaccacaagttgacatgcatggttatgcgatcatctctgtgtcatcgggtgatgggatcggcaagctatttaagggcttgggtgtcaccgacatcattgctggtggtcaaacgatgaatccaagtaccgcggatatcgtcaaagctgttaatgacagtggtgcccaacaagcattagtattgccaaacaacaaaaacatctttttggcagctgaacaagctgcggaagttgccgatgtcccagttaaaattatccacagtcagacgatttcgcaaggcatgactgcaatgttggcattcaatgctgaagctgatttagacgataatcaggccgcgatggaagaaaccttgagtacggttgttagtggtcaagtcacacatgctgttcgcgacacgacgattgatggccttgaaatcaagaaagatgattacatgggcttagttgatggcaaaatcgtaattacgaatccagatcgcgataccgctgctttggatatggtcaaagccatgctcgacgaagatagcgaactcgtaacgattatttacggcaaggatgcaactaaaactgacgctgatcatttggcagctaaggtgcaagagttggatgatgaattagaaattgaaattcatgaaggtgaccaaccagtttacccattccttgtgtcagttgaataggactaaccgttaaaaatagggcttagcagtgatgctggggcctgtttttgtacggacggatacttcccgcgggattgaaacgtttttttggtataattaatattggtaaaggcaattattttagaaagggcggtggtcaggcatgggacaacagttgagtgacgcggttgcaactttaagtggtgtcggcccagcccgccaaaaaggtttagcggagcttgggattaatacgattgcagatctattgacctattatccctttcgctatgaagatctacaggtcaaagacgtcaatgaaatcgccgatcaagaaaaggtgacactaaagggtactgtggcttctgaacctgtgctagcacggtttggccgtaagaagaatcgcctgaattttcgcttgttaatcgaccatgacgtctatatggtgactttttttaatcaaccatacttgatgaaacagattgagactggccaagatttagccgtttatggcaagtgggacgccacgcgcagtagcttgacgggaatgaagatcatcaatcccaataatgcggattcagcgtttggttcgatttatccggccagcaagacggtcaagcaggggacgattcagaagatgatcaaacaagcatatgagttatatgccccagtcattacggacattgtgcctgctaacttacgtgctaaataccgactgttaccgcggcgccaaatgattcatgatatgcacttcccagctagtcaagccgattcaacggccgctcgacgctcagcgacctacgaggagttcttgttgtttcaaatgcaaatgcaagttctgaagcaaacggacgcgacgacgaacggtattgcgatcgcttatgacaatgaccgactaaaggcgtttattaaaacactgccatttgaattgacccacgcccaaaaacgtgtcgtcaatgaaatttgtttggatttgaagtcaccgaagcatatgaatcgattgcttcaaggtgacgtggggtccgggaaaacgattgtggctgccattgtcatgtatgcggcgattaccgctggttatcaggccgcgttgatgacgccaaccgaaattttggctgaacaacacgcaaataacttggcccaggtctttgccgacacggatgtcaacgtcgcactgttaacgggtgcgaccaagccagctgcccgcaagacattgttagcagcgctggctgctggtgagatcaacttattgattggcacgcacgccctgatccaggacggggtgacttatgctaatttgggattagttattaccgatgagcaacatcgctttggggttaaccaacgggccgcctttcgtcaaaaaggcgggcaacctgatgcactagccatgacggcaacaccaattccaaggacattggcgattacggcgtatggtgaaatggacgtttctgaaattgatgaattaccggctggtcggcaaccgattcaaaccacttgggtacggagcaaccaagctaattcggcgttaagctttgttcatcaacagattgacaatggatcgcaagcctatgtggtgacaccattgattgaggaatccgagacgctggatgttaaaaacgccgaggctctgtcagctaatttacaagagtattttggggcgagtgttaaagttggactgttgcacggtcgaatgaaacctgaggaaaaagacgcggtcatggcggcttttaaggcgggagacattcagttacttgtttccacgaccgtgattgaagtgggtgttgacgtcaagaatgccacaatcatgatgatttatgatgctgaccgttttggcttggcgcaactacatcaattacgcggacgcgtcggtcgtgggaccaaggcttcatactgtattttggtggctgatcccaagaaccagcaagggattgagcggatgcagatcatgacgcagacaacaaatggttttgttttggcacaaaaagacttagaattacgaggagccggtgatgtgctgggtgtcaagcaatcgggaatgccggaatttaaagtgggtgatccgattgcggatttgaccgtgctacaagttgcccagcaagatgcccacgcaatcgtacagcaaccggattggcaaagtcaaccggataatcgggcactagccgcctatttgagccagaagttggctgcggtggggacgctcgattaataacctaaatacagtactgtgatgagaggaatggtgacacaatgattaaaattgcgattgatgccatgggtggcgattacgcccctaacgctgtgatcgagggggtcgaacaggctcgtgatttatttgaggatacggtctttttattatatggtcaacgcgatgtgattaacgcgcaactgaagaaccgtgatcggattcaaatcatcaatgctgatgaagttattacgatggaggatgaacccgtacgtgccgttcgccgtaagaagcattcatcaatcgtaatggcggctcaggccgtgaaggatggccaggcggacgccttcttttctgccggtaattcgggggccgttctggcggccgggttatttatcgtgggccggatcaaaggcatcgaccgaccgggattagtgacggtattgccagtggtacgcaatgctaaccaatcgaactttgtgatgatggatattggtgctaatgctgatagtaagccactgaacttgcaacaatacggtgtgttagggacgtactatgcagaacggatgatgcaagctaagcatccacgggttgccttactcaataacgggacggaagatgacaagggaaataaggtccataaggcagcgtttgaactcttgtcacagactgacggtatcaattttgtcggtaatgttgaatcccgggacttattgaacggggttgctgatgtcgtcgtaacggatggttttacgggtaacgccgttttgaagagcattgaaggtacggcgcgttccatgctcggtttagtgaaagatgccgtctatgacaccggtatcagtggcaagttaggcggcctattgcttaagaatgggtttaatgaaatccggtctcaaatggactattctcagtacggtggcgcggtcttactaggattgaaggcgccggtcgttaagacgcacggttccagcaaagcgccaacaatcgtgaatactatccgccaaattcgccagatggtcagtacggatatcgtcccaggagttgcggaatattttgctaatcaacaagctaatcagcaagcaagtgtagacattcctgctgaaaacgattagaatactttagtgaattcaagttagtgagggatctttacatgacgaaagaagaaattttcgataaaattgcggatatcattgctgatcggttcgaagttgataaagcaacgattaccaacgaaatgaacttgcaaaccgatttggatgctgattccatcgattttgttgagtttgtactggaattagaagacacctttggtagcgaaatctcagacgaagatgccgaaaaattgtcaacggtcggcgaagtcgtcgattacgtggcagcgcaccaagcaaaataagttaattgaccaagcaaaaacaggtagccaacatggttacctgtttttgcttgtctgactacgaaagtaccgatatcattgttattgaccactaaatcatagtataatgttatgatatgcaatgtgtgacctgttgactgactgattatcagatgaatccttacttaagcggacttttaacttgtgtttctatattgttggcttctgatcatccacggtcgattgccacggctgggtgaaactgaacattgcgtgtaagagtagcactgaatacatgtcggaagcactcgaacggcagatgaatgaccaccttaaataatgattcatgctaagttaggcaccaccagtaacagattgtgataactggctgatccaatggggttagtcgatagaatgataacgaaaggaagtttcaaatgattacagaattagctgcaatgttgaaggaacggtttggcattgtgtttaacgatcccgatttattggcggaggcgtttacacaagcctcgtatgtcaatgaacatcaggaccaacagttgaagtattacgaacgggtcgaatttttgggggatgccgtcttggagttagtggtgtccgaatatttatacaaacgttataaagacatgccccaaggtaagttgactcgtttacgggccgccatggtttgtgaagaaagttttgcaagctttgcccgtgaatgtgactttcctcagtacatccggttaggcaagggcgaacaaaaagcgcatgcttgggaacgagattcacttttatgtgatatttttgaatcatttgtcggggcactgtacctggatcaaggacgggaacctgttttgaagttcgttcatcaagtaatttttcctaagctggatgagggtcgttttgatggcgtttttgattataagacgaccttgcaagaatacttgcaacgggatggcgatgtcgcaatcgactatcaattaattgaacaagatggtccagccaatgagcggtcttatgagattgccgtacttgccgatggtcaaaaaatcggtgagggctgggggcattccaagaaggaagccgaacagagcgctgctcggcaagcttattcacaattacagcaaaagtaaccattaataattacaggaagtttgtgtcgaatgcaacttaaatcattagaaatcagcggatttaaatcatttgctgataaaaccaaaattgattttcaagccggaatgacggggattgtcggcccaaacggtagtggtaagagtaacattattgaagctattcgctgggtcctcggagaacaggccgtcaaaagtttacgcggcactaagatgaccgacgtcatttttgccggctcggctaatcgaaaaccgttgaatatggctaaagtcacgatcacgtttgataacagtgaccactttttacctttggattacgcagaagttagtattacgcggaaactctttcgtaacggtgacagcgattatttaattaataatcagagttgccggttgaaagatattacgaatttgatgattgatactggtctgggaaaagactcattttcagtgatttctcaaggtcgtgttgaggcggtctttaatgcgaaaccagaagagcgccgcagcattatcgaagatgtcgctggggtcttaaagtacaaaaaggataagttcacgacggagaataaattagcggaaacgacggattatttagaccgcgtgaacgatatcattgctgaattgaatcagcaaaaggggccgttggaagaacaggcgagtcttgcccgggattatcaagatcaaaaacaaaaatttgattatttggaccgttcgcggctcgttaagaagttgacgattgctcgtgatcaactacaaggtgtcaatgaaaagttagctagtgccaaggcgttagtggctaagtatcagcaacaagttgatgctggtgcaaccaagctagctaatttaaaaacccagcagacagctcaattaaagcaaaaagatgagctggtagcacaaaatcttgagctgattaagaccatcgaaaacacgcaaggacaacaaggggttgacgctgaacggcggcaaaaccaacagtctgagcaggaacggctgacggccagtttgaccgcaactgagcaacagattgcgacgcaaaccgagcaacaaacccaattagaacaaacattatctgagcagcaagcccaagttaaggcagtcaaagcgcaagttgccgagttaacgacggcaacgagtgcggccggccgtcagcagttggctgatgagctggaaaaattacgcaatgcttatattgatgaaaaacaagttcaggctgaactgaataacgaagcgaagaacctcgttaagcaacatcaacagtctggcagtcagagcacagcgttagcagaacggctagcacaggctcaggctaacttgaaacgggtgcagacgaccgtagacgtgcacaatcgtgagcaacgtgatttagaaaatcaagttaatcagcagcaggccacgctaacagcccaacaagcccaagtaaaaacgaatgcagagcggatcgacgagcaacagcaacgttggttagacgcggctggcttgatgcagcgtgaaaagtcacggctagaggcgttgcaagctgttcaggaacgctatacgaacttttatgcgggcgttcgaatggtcttacaacatcgccaacagtttagtggcgttgccggggccgtttcagaactcctgaccgttcctgatcagtatactaaggcggtcgaagttgcgctgggcggacagttgcaaaatattgtttgtgacacacaacagacggctaaaactgttgttaatttcttaaaacaaaatcacgccggtcgggcaacctttttgcctatcgagcggatcacagctcgtcaacttcccgttaacactgagcgcgatttatcacaacaacctggtgtgttgggcgtggctagcgagttggtcgattgtgaatcacgattgacggcaatcaaacgttacttgttaggaacaacggcgattgtggacacgctagaccacgcgatggcaatttcacggagcagacgttttcggtgcaaattggtaaccattgatggtgaaacgattgcggccagtggggccatcaccggtggtgcgactcgccatgatgataatgggctactccaacagcaacaatccgcggaaaaaattgcagctaatgttgcccagatgcagtctgaattagtaacctatgaacaagggctagcagaccttaaaaaagctaaccaagacttgacggttcaggttgaaacgacccgccaacaactaagtgaacttaaggatcgccttagtcagacacaggcccagttacaggcggcacagagcgagcaaacgcagctaagtcgtcaagttaaggctttaacttatgagcagcaacagacgcaagctgatgatagctatgaagacttagtggctcgtaatcaacaagcgcaagcggctaatgcggctaagcttaaagactatcaggaccaaatgaaaacagtccaacaacagcaaacggattacgaaagttatcaacagactcaaacgacgaaattacaagcccagcgtgaacaactgattacgttgcaggaacacgtgaaacaaacgcaacgacaattagaacaatgtcaggcgaccttggcgcaaaatgaagagacgaaaaagcaaattcaagcggatttaacagcaattaaaacaacgttagcgagccagcaaatgtcggtcgcagaacgcgatacggtcttgaaaacagctaaggctaaacaggctgcggttgaagaacaacggaaaacgtgtgaacaacagctagcaacgcttaatgatcaggttgaagaattatcgacccagcaagttcggttgcaacaactcgcagcggccgcaacggatgattaccgtcgcttggaattaagccaaacaaaattgactggcgaagtcgaccacgccacggctgatctggctgaaaagtaccagttgacagttgccgcagcacaagctgacgtcagtgacttagcgttacctgcgattacagaacagttgaaactgcttaaacggggcttggatgagattggaacggtaaacctcggcgcgattgacgaattcgagcgggtcaaggaacgctttgactttctcaataaccaagcttccgatttaactgaagccaaggaacacttactgcaaacaatggctgatttggatacgaccgttgccacccgctttaaaacggcatttgatcaagtcgctagcgaatttagtacgatttttgaacagatgtttggcggcggtaaggctgaattgatcttgaccgacccagaacatttattgaccagtggggttgatatcatggcccagccaccgggcaaaaaatttcagcgattaagcttactttctggtggggaacgggcgttaacggctattacgttattatttgccattttagcagtgcgccccgtgccattcagtatcttagatgaagccgaagctgcgttagacgatgccaacgtggatcggttcagtcagtatttgaatgattttcaaacgggaacgcagtttgtgatcattactcatcgaaaaggaacaatgatgcacgctgacgtactttatggggtaaccatggaagagtcaggtgtctccaagatggtctcagtctccttggcagatttaaaagatgaacaaaaataattaaaggaagtgttgaagatgggactatttagtcggttaaaaaaagcgtttagtttaccagaatcagatgacgctcaaacaacgtcagctgccagtgaagcgccagcaacgacaagtcaagctaacgcaccggtcagtgacgaccgggccccttcgtcacaacagccagctcgctcggagggcgcaacaactgaatcaactgcgacaccggtgtccagtacagccgtaagcgaagcgacaagcactgcggacgaaccagcgacagtaaaatcggcagctactagtgaagccccggccgatagcacggcggcagtgagtgcacagtctggttcacaagcatcactgcaatcggcgacggtgtcggaagcgccactcacagccagtgcaatggttgcccagtcactagctgcattaagtgcgagtgcggcacaagttagtcaagcggccgcgagcgacgtggcgttagcgactaagtctgatgcggtagttgaaggcaacgctatgtcagaatcagtagccagtacggcgccagcagtcaagtcatcagcgacgactgcgactgaatccgccgcaccgactgttaatgcggcggctgattcggaatcggctgagccggagccaactgaggcagaacgttatgatgaaggactgaaaaagtcgcggaaaacgtttggtgatcgtatcaatgccttcttggctaatttccgccatgtcgacgaagcgttcttcgatgatttggaagatacgctgattgaatctgatgtgggttatgagaccgcgatgcgaattagtgacgagctacgtgacgaagttaaattaaagaacgcgaagagcaagaaagaaatctcaagcgtcatcgtcgaaaagctcgttgatatgtacggtgaagctggtgaaggcgaggataactcgattcacatggctaagagtggtccaaccgttattttatttgtcggggtcaatggtgctggtaagaccactacaatcggtaagatggcgaacatgtacaagcagcaaagcaagaaggtcttgttggcggcttgtgatacgtttagagctggtgcaatccagcagttgcaagtctgggggcaacgagacggggttgacgtggtcgctaaggccgaaaaaagtgatccagcggccgtttgctttgacgcggttaagaaggctaaggccgaagattatgacgtgctctttgtggacactgctggtcggcttcaaaacaaagtcaacttgatgaatgaattggaaaagatcaagcgggtcatcacccgtgaaatccctgatgcaccacatgaggtcttactggtgctggatgccacgactgggcaaaacgcgctgaaccaagccaaattgtttaaacagtcgacggatgtcagtgggattgtgttaactaaacttgatggtacggcacgtggtgggatcgtcttagctattcgtaatgaattgcatcttgctgtaaagtacgttggtttaggtgaaaaggtgactgatttacgaccattcaatgccaatgactttgtctacgggttatttaaagatattatcacgggttaaatcagttgatgatggtcttaaattgaaagccagttaacgaatggtaattgttctcagcacgaggacgattaccatttatttttaccacaaatagcgactgatagttgacgaatggcgataaaatcggtactcttatttagtgtgtagtctgtatgataagcgtgaggagtccccacatggaaattgaaaaaaattatcgaatcaattcgttattcgagttttatgaaccgttattaacgaataagcaaaaagcctatattcaactgtactacgctgatgactattccttaggcgagattgcagcggagttctcagtttcgcgccaggccgtctatgataacatcaagcggaccgaaaagattttagaaggttatgaggctaagctgcatctctaccacgactttgtggaacgtaatcacgaagttgacgcgatctctgactatattaagcaaaattaccatggggatacccagttaattaagatgattcaacaactagtcaacttggaagctgactcagaataataataaaggttaggtgacactaatggcatttgaaggcctaacggaacgtttacaaaaagcaatgaccaatttacggcgcaaggggaagatttcggaaagtgatcttcgagcaaccatgcgtgaaattcggttagcattacttgaagccgacgttaactttacggtggtcaaggattttgttaaaacggttcgcgaacgtgcgctcggcgcaaaggtgctggaaggtttaaatccagcccaacaaatcgttaaaatcgttgatgaagaattaacgaaaacaatgggtgaaaaggcagttccactgaacaaatcgccgaagattccaacggtcatcatgatggctgggctccaaggggccgggaaaacgacgacggtcggaaaattagccctcaaattaaagaacgaacaggatgcccgaccattaatgattgcggccgacgtttaccggccagccgcgattgaacaattgcaacaagttggtcgccaaatcgacgttccagtcttccaactaggaaccgatgtcgatcccgttgagattgtgcgtcaagggatggcacaggcgcaagaaaaccacaatgattacgtgtttattgatacggctggtcggttacaaatcgatgagcagttgatgaacgagttggccaatattaaagatctcgttcatcctgacgaaattttgttagtgatcgatgcgatgactggtcaaaacgccgttaatacggcggagggctttaacgataagctggatgtgaccggggtcgtcttgacgaagttagatggtgatactcgtggtggggctgcactatcaatccgggccgtcactggtaagccaatcaagtttgtcggtcaaggcgaaaagatgactgatcttgatgtcttccatccagaccggatggcggatcggattcttggtatgggtgatatgctgacgctgattgaaaaggcgcaacagcaatatgacgaaaaacaagccgaagaaatgaacctgaagattcaggaaaacacttttgacttcaatgactttatcgaccaattagaccaagttgacaagatggggaacatggaagatatcatgaagatgattcccggcatggctaacaatccagcgatgaaaaatatcaacatggacccgaaagacattgcccatatccgggcaatcgtttattcgatgaccaatgccgaaaaagcagatccggatttgttgaacccatctcggcgtcgacggattgcggctggttccgggcggccaattcatgaagtcaaccggatgatcaatcaattcaaccagaccaaaaagatgatgaatcaaatgtccaaagggaactttgctggtatggaaggtctcatgggtggtgccaatggcggtggtggtatcggtggtaagatgcaacaaatggccatgaagcgaatggttcgtcaaactaagaagaaaaaacaaaagcgcttagccaaagcaatgcggcgtcgcaaacgctaatttataagtttttttagcctgtcaagaaaaagtcctttacaagctattgatttactggtatattattacctgttaaagaattcgggaggtgtttaaatgtcagtcaagattcgtctaaagcggatgggttctaagaaaaatccattttaccggattgttgtcgcagattcacgttcaccacgtgatggtcgttttatcgcccaagtcggcacatacaacccacttacagaaccagcccaagttaaacttgaagaggaagatatcctcggttggttgaacaatggtgcccaaccttcagatacggttaagaatatcttatctaaggccggtatcatgaagaagtaccacgaagctaagttcactaaataataaagcggtaatagatcatggcagatattaaagctttaatcaccacggttgtcaccccgttagttcaatatccagacgatattaaagttgattttaaggaaaccacgcgttatcttgaatacaacttaacggttaatcccgaagatatcggccgggtcattggtcggcagggacgggttgcttcggcaattcggacaattgtgtatagtgtccgagtttcaggacctaaacgtgtccggcttacgatcgaagacggacaacaaaaaaactcttgagcgaagcagtgatgttttgtttaagagtttttttatatcttgttccggtttttgaggacgagtcaaagtatctcgatgaccgtcgttgagtagattagttgtaacatgttgatgacatttaaaacgaataacaatcaagctaattaagaggaggaagctaatggattactatcgtgttggcaccctagttaacacccacggcattcgtggtgaagtgaaagtcgttgtcgtgactgattttccagaagaacgctttaaagtagggcaacaattgagtttatttaaaaccccagatgaaacgactggcgggattactgtcaaaatcgcgaaggcccgtgagcaaaagggactgtactttcttacctttgaagggctcgataacatcaatgatgtggagcgctataaggggtggacgatcaaagttcctgctgaagcattacatgccttaccagcgggtgagtactactatcaccaaattgtcggcctacaagttgtgacgaccgctgacgagcctttagggactattaaagagattctgtcacctggtgcgaatgatgtttgggtggtcaaacgggatcatggtcagtctgacgtcttactacctaagattccccaggtcattaaagatgttgacttggatgcgggcgtggtgactgttgaactaatggaagggctgattgattaatgcaaatcgatattttaagcctgtttccagagatgtttgcggggccgcttcatgagtcgatgattggcaatgccattgaaaatgacgtcatcaatgttgatgtcactaattttcgggattttacgaccgacaagcataaccatgtggatgattatccgtatggtggtggtgcgggcatgttactccaaccacaaccaatttttgatgctttggccagcgttcaggaaaaacacccggcacccggtcgcgtgatcttattggatccggcgggagtccagttcaatcaacacgttgctgaagactttgctcaggaagaacacttgacctttatttgcggccactatgagggttatgatgagcggattcggtcattagtcaccgatgaagtctcgctaggtgattacgttttaactggtggtgaactgggtgcaatggtcatgattgatgcgacggtgcggctcttaccaggtgtgcttggcaattcggaatcggctccgggggattctttttcgagcggtctcctggaatacccacaatatacgcgtcctgctgattttcgtggtatgaaggtaccagatatcttactgagtggtgatcatggaaaaattgatgattggcgcttagaacaggcactgaaacggacctatgaacggcgcccggacatgttgacggggctatcattgtcaggaaaagctaaacagatgttagcagatatcaaggcggatgagtcggaagtctaggctatgccgttaattaggacaagttagtcgtgaagagttcaaaaaaacttgcgtgcccaccctcgaatatggtattctatttattggctattgtgcccattaacgatgttccgctgaccaggttgtcacgaatgtcggcgaaaggaagaaatacattatgcgtcaaaaccaattgatcgaaaagatcaccaatgaacaacttcgtacggacatccctgatttccgtgctggagacacagttcgtgttcatgcacgagttgttgaaggtactcgcgaacggatccaattatttgaaggtgttgttatcaagcgccatggttccggtatcagcgaaacttatactgttcgtaagatcagtaacggtgttggtgtggaacggacattcccattacacacaccacgcgttgccgcaattgatgtcgttcgtcaaggtcgtgtacgtcgtgccaagttatactacttacgtaacttacatggtaaggctgctcggatcccagaacgtcgtcgtggctaaatcacaacgtcaacagtcatcggttgcagcttaggctgagctgatgatggaaagctagttaatcatttttaatgattagctagctttttttattggcgaagttagtgacacgctcaatcgtcaaatcatcgaccaatttaggtcggttcacaatgtgagcatgctgtgcttggatttataatttaacaatcttacgagatagctcgtaattcctaatttgaagtattatgatagtaatacgagtacgcaatgcttcttgggatgcgtcaattagctgaatatgaatcacttgatatcagactaaactgatttatttgaacagggttgtcgcgtacctgacgtgtataactagtgctaagctggcggccgggttaactaaacgggagattgctcaaagcgagcacgataaaataaaagagagttaggtgaaagccgatgtttggacgtacggggaaacatcaggtcgatgaacaggcgttattgagtcaattggttgacttcgttctcgaccctaatcttaccgaccgtgaacgtaagatcgggttgatggccaaagccgatttggagcatcatcgctattcaattgctgtgttaaataaattagtggtcagttttcaaatggaggcgctacgcaacaagggcctctcgaaggctgcttcaaacttttatgatcagatttatccaatattagtcgcggccaaaccaatgggaacgaatttaggctatattgggatgcatagtacctatttagattagggtgtgtcagtgatgaagttactagcgaaaccagaccgtctccagtcggctgacgatggtttttgaacgtaagcggccgggcgtcatcggaagtgtattgataacagcttaaatgagaacatcgtgcggcatgtccgtgcccctttgaatgaaacccattcagaggggctttttggtgtggaaaacagttcatgatctgcgcgtcttaacaatattaggtgatgtggttggcgggcgataaaaattgtttggtgctgctaaatagctggtaaacgatttcagccgtagaacaaatgctatacattgtttgataagtaccgaactgggatgcggatgagccagattcaaaataagtgtgtcaatatgttggttatatcagtattttaatgcagtgttatagcgtgaactgatactacaattaaataatctcaaaaataatttcgtctattttttgttatgcacttgttatttcaacttatttgaacgtatactaatgattgaaggggtcaattaggtgatagtttgatgattaacacaatcgtttcggcacggtacgaaacgcaccaaatattactcagctaaataacttgattgctccaggtacggttgaactttggagggcagaattatgcggaatcgtttaaataggttgggattggaaagtaagtctcattataagctttataaatcggggcggcgctgggtggctgctagtatcacagtattttcagttggcatcggtttgacttttagccaagttgaacaagtgaaagccgcaacgggtacgggggttgacacggccgacaatagcgctagcgttagttccgacatggcagaaccgagcaatgccgtcgtactaaaatcagctagtacggcgacagctactaagaccgcgactcaggatgcaaaagctgctactgatgtaacggccgcgactcaggatattaaagcgactactgattcaactggggcaacttcagcttccagtaatcgccagtcgacagcagctacgaagccagctgccgaagtcggtactgcttcaagtagcgctgactcaagtgctagcatatcaagtactgatggcgcaagtgctagtgcaccaagtgtcaccagtaaatctactaacacggaagccacatcagcatccgcaactaaaacggctactacgagtgctgacacagatgtgctaaacactgagacgacaagttcatcagtggcaaatgatctcactgatgctacgacagctagccaaacgcgtacggaaactgggaaaacagccagcatacctactgctgaagcaccgaccattacgactgcagtgacaagtcgggcactcccattgacgggtgcgctagcgagcaggtcagcaaacacgccggtcactaagtctgcagtacaggcggtttcagctatcaccagtgaagctgaaacgaagccgaccgtatcgttagtaactacggggaccgtgtcgatggactatggcgaggcgtcgctggcggatctagaatctcatattagttctccagatgagacgccggctaacgacgtcgcctactacattcaagatgcagcgggcaattacttagaagatgtaaacggcaacaaggtcaatttgctatatgcactttttctggactctgctgatgtcaatgattacgttgatgttgtgtatacggatgaacatgggcaggtcacgaaatattccggagatacggacttttcaacgctcgaccaaattggtagttactcagtgacgatcaatgcagcgggtaaagctgggatgagccgggttatgcaagactataatgcttacgatacctcgaccagtgatttggatgactttgtcccaaccttttcgactggggcctccgattatacctttacaattaacattgtccctgtaaaaatcacagccaccactggtaagaatgggctaattatacttcggccttcacagttgtatacgggatcattgacaatgttgccggtagtcaccgttaaaaatgcaacaaagcaaaatatccttcaaattagtaacggcgaaatcggcgatgctaaaccaggcgtagccggcaaggtcggtcaacgtgttttaacgttggcagattttacttatacgtatcaaggcaccgaaactaacttgaccggtgcggacactggcaaatatgcaatcacccttaatgacgctggtcggaaggcagttcaagctgcgctggggtcgaattatattctggatgatgcggccgttttcaccacgactggtgcggtgcaggctgctggtctcgagttaaagatagctagtggtacagtgacctataatggcaagcctcaggggacatccgtaacgactggaaccgtgtatgatcattttgactttaccacgacgactgacacgaacgtcggtacctatgacgacctgacatacgcgttagcggatcccacgcaagcggcgattttggctaaaaactataccgttaccacgacggatgggacgttggtgatcacgccagcagatctgacagtcacggtcaaggatgataatgcagtttatgacggccgatcacatggcacgactgccactgttactagcgggaccaattatgatcagttagtatttaccgcagttgcagcagatggcagtggtgcgacgacttatactacggtcggcacttatgcaatgactgggactacggcagccgataccagtaattataaaatttcgtatgtcaatggaacgctgacaattgatccagccaaagcaacaattacgattcccaacaagatttattggtcggatgggacgcaaaagaatttggcggcggtggttactgggacagttaatggtgagaccttaaagtatcgtgtgaccaacggcatgagtgcggttggaactaagacaattacggccactcctgatgctgatgattcggtgaataaaaactataccatttcagtcattcctggcaccttgacaattggtgatattgcggttaagtacctctacgaacatgtagatgctaatggtgagactcaggtagatgcttcggaaactggtacggcgacacatgctacggacgcaacggccacggactatttgacctacacgacggcagccaaacccaagacgggctatgtgttagcacccaatactggactagcctataatggcacgttaactgatcagggcggtaccgtgacgtatcgttatttggccaagactgaaacggcgatcgtaacgtattttgaccaaactgataacaaggttattaagacggaacccttacaaggagcgtacgggacaacggatgcgtatcggacggctgatacgattgccgcgtatgagaatgcgggctacgacctggtcgatgatgactatccaacagccgggggagtctatgaccaggacggcattgttcaaaagtaccaggttacacttgttcataaatttgtaacacgcacgccagataatccgggtacgccaggcgagccgatcgaccccgataatccaaacggacccacatatccagtggggactgactttgaggatttaactgagcaagtcagtcgaacgattcagtatttatacaaggatggtcgcactgctaaaccggacaatgttcaagcggttaattttggtcgtaacgtcacggtggatgaagttaatggcacagtcgtctacacagattggttgactgatgatggggccgtgactggtcgttttgaggctgttgattcacctttgattactggttatacggctgattcaaccagtattgccggcaatcccgccgttgtatggcaggatgatgacacgacgattcctgtgacgtataccgtgaacaaagagtatgcgacggtcacgtattttgaccaaactgataacaaggtcattaagacggaacccttacaaggagcgtacgggacaacggatgcgtatcggacagctgatacgattgccgcatatgagaatgcgggctatcaattgtaccgtgatgactatccaacagccggggtagtctatgaccaagacggcagtgttcaaaagtaccaggttacacttgttcataaatttgtaacacgcacgccagataatccgggtacgccaggcgagccgatcgaccccgataatccaaacggacccacatatccagtggggactgactttgaggatttaactgagcaagtcagtcaaaccattcagtatttatacaaggatggtcgcactgctaaaccgaacaatgttcaagcggttaattttagtcgtaacgtcacggtggatgaagttaatggcacagtcgtctacacggattggttgactgatgatgggaccatgactggtcgttttgaggctgttgattcaccttcgattactggttatacggctgacccaaccagtgttgcgggtcgtgatacggtgagtgggacggatctcagtccagatgtacaagtttattatcaggctaatcctgaaaaagccacggtgacctatgaagatatgacaacgggagcggtgctgacgacagatccgataactggtgattatcagaccgtctcgaattatcggacagcagatcgaatcgctcagtaccttaatatgggctatgaactggtcagtgatgattatccaacatccggtgctgtgtttgataaagacggaagtactcaggcttatactgtcaaattgcaacataaactcctgccgctcaccccagagaacccgggtacgccaggcgagccgatcgaccctgataatccaaacggacccacatatccagcgggtacggctgtgcaagacttgattaagcaagttgatcaaaccattcactatcagtatcaggataaaagtactgctgccgacgctaatacgcaaacaatcactttcaagcgcagcgtgacggtcgatgaggttaacaataagctaacttataccgattggttgactggtacggcaacgactggtcgttacatgccagtcgattcaccggaaattaaaggctatgttgctgattcaacgcgtattgcgggtaatgacgaggtgcacaatgcggatgctgacacgaacatcgtggtcacgtatcaggctaagccagagaacgccacggtcacgtatgtagacgtcactacgggtaaaacgctcgctataaaaagcttgactggtgactatcagactacgtccagttaccggacggctgaaacgattgcgagctatgtcaagaatggctatcaactcgtacgtgataactatcccacttcaggggcggtgttcgacgtcgataattttgccaaaacttataccgtgacactgaagcataagttagccacggttacaccagagaatccgggtacgccgggccaaccaattgatccagacaatccagacggaccgaaatatccagtaggaacgaccgctcaagatctgacgaaacaagtcagtcaaacgattaagtatcggtatcaaaatggcgcttcggctggcactgataacgttcaactaataacgtttaatcgggatgccacgattgatgaagttgatcctaccgcagtttatactgattggttgaatggcacttcagctagcggtcgttataccaccgtgatgtcacccgtcattactggctatacggctgataaaacacaggttgctggtcgtgattcagttgctaatacagattcagacacacaggtggtcgtcacctatgcggccaaacctgaaaaagcaacggtcacttatgtggatgtcacggcgggtaaaacgctcgctacggccaatttgactggtgactatcggacacaatccaattatcggaccgctgaaaccattgcaggttatgttaaaaacggttatgaactggtacgtgataattatcccgtatcggggatgctgttcgatgtcgatgattttgctaaaacttataccgtgacactgaagcataagttagtcacggttacaccaggtaatccgggtacgccgggccaaccaattgatccagacaatccagacggaccgaagtatccagtaggaacgaccgcccaagatctgacgaaacaagtcagtcaaacgattaagtatcggtatcaaaatggggcttcggctggcactgacagcgttcaactgattacgtttaatcgggatgccacgattgatgaagttgagcctaccgtagtttatactgattggctggatgggacttcagctactggtcgttataccaccgtgacgtcacccgttattattggctatacggctgaccgggcgcgggtcacgggaaacgatgcagtaactagtgcggcgcaaccgaccaacattattgtgacgtatgcgcttaacgcagaaaaggcgacggtcacctatgttgatgtcaccacggataaaacgctcgcgaccgtcagtttgactggcgattatcagacatcatccgattaccgcacggctaacacaattgctgattacagtaatcagggctacgtgcttgtccgcgatagctatccagtttcaggagctattttcaatgatgatggtgttgttcacagctatctggttcagcttgcacatgtgacaactgcgacaaccgagaccaagacgatcacgcaaaccgtacattatcagagtacgactggcacgcagttgcacgatgatacggtcagagcgatgacattcactcgtactaaacgggttgatcaggtcaccggggacgtaacgtatagcaattggtcgactaatcaggcggatcacacttttgagcgcgtcgcggcgttcagtattccgggctatcatgcggtggtaacgggtactcaggcagtcatggttacgccagctagcgtggatgatgttcaaacgattcgttacgttaccgataggctttcaaccggtgagacaccaaaaacaccagtgaagacggtgacagttaataagtcggataaaattaagacgactgacacgccagataaagtcgcaacggtcaagacgccggataaggctcagaccgtcgcaacaacaactgctaaacaagctagcgtcaagcggtcagtggatctcaaacaagcacaggctgttgaacagcctgctcagacacgaccagccaatgtaaaaacggttaaactggcgaagacgactaaatccgttaagccaaccgcggctcatcaatcagccacccacaaacaagcgactttaccgcaaaccaatgatgatcggcaagctagtgttgcggcggaactacttggtttgactgcagcaaccttactagttggtgtgagtgcaattttgaagaaacgtcataattagccgttaaatggaggcgttaatatgactactttaatcgatatcacgggtcagaagtttggccgcttaacagtcattagacgttgtggaactgccaaaaatggcaatgccctctggttgtgtcagtgtcgctgtggcaatcagaccaaagctgattcgtacgcgttgcggcatgggcgagcaagaagctgtgggtgtttgacacgagaaagtcggtcgcagttaattcgacgtaatcccaaaacggctgccagtatggggcggttaagcaatctgaaaattcatgatcatcacactgatttaccgtcaaagattatgtctaagcgtaataagagtggtgtcatcggtgtcagctgggatagcaatactcagaaatgggtggcgacatttttctacaaggggcgctacctgttacacaaaccgtttcagcactttgaggacgctgttcttgcccgccaggcgatggaaaaccgttatttaaataacaaagtgtaaattaaagttcttccttgagagggcctgatgccttgtcagagaagaactttttggcgttacagcaacggtaccagcttcttaattggacttagtggagttctttcagaattgtaagtaacaaaaaggcctaacatgggaatgccagcggataaattgtgcttgatttatggcgatgaaaattcctaaatgatttgcttgtatatgacaattattaaaaataagacggtccctgatcgaactagaatcataagtatcttgggggcaggtgatttaacggttcttggttgcaatatgtttttaatcaacagtctgatgaaacttgccctagaagttgaggttaactgatgcttctggatcggtgaaatcgttagtttcatgatggaactagtcattggcgacagaagcgttaatcaatgagcaacgtaccgctccggtttcgaattttcagacgattccggtataataaaccgtaactgatgactagggggataatcacatgattgaaattcacgaattaacaaaacgttatggggataagacagcattgaatcagcttactttaaccatcgcatcaggacaaatcttcggtttgctgggccacaatggggcgggtaaatcaacgacgatcaaaaacttagtcagtatcattaaaccgacgagtggcacggttacggtcgatggcttagaccttgaacagcaacgacaagccgtcaaagaaaagatctcttacgtaccggacacacccgatatttttcttcaactttcggcgatggaatattgggacttgatagctgccgcttaccagcaatcagaggaagccgttcagcaacggcgacagcagctggtgtcactgttcgatatgactgaacacgttgacgaacccatggctagttattcacacgggatgcggcaaaaagccattttgattggggcgttgcttcccgatccagatatttggattttagacgagccgctgcaagggttagacccccaagctgcttttgatttaaaaaatttgatgaaggcccatgctgccaaaggcaagacggtcattttttccacccacaatctggatacggcgcagcagttatgtgaccgattagcaattttgaagcaggggcaattgatttataccggttcggttgaacaattactagctcaacatccgcaacaatcacttgaggcgatatatttacaaatggccgggcggttgacggatgatcaccttgtcgatgcgctggagggtgagcatgatgcataaaagtcagttgcgtgttttgttggctgttaatctcaggttgttgaatccgcaactaacggatcggctacgtaaaaagggcgcttcggggccagccttgagtaagaagctaatgcggcaattttacttgaatgctttgatgtttcttggcatttatggcttgacgatgttggcctttgattttagcaagttgccaggcatgtttacgttctatgtggcgttatttatcttattgggaatttcacagagtatctcgggtatttataacgtcttttttgccggcaatgatcttgttgaatacttaccgttacctttccgcaatcaagaaatttttatgagtaagattttggtcgtgatattcaacacggtaccctttaccattccgttactcttaatttttatcatgaccgcaacacgggcaggaatctttgtggtgttaggcgtgctgatggccgtcttgatgtatggcctaatactgagtctgttactatgcttgtgcgccctaatagtttttggcttaaccaagctaaccgtgtttcgcgcccatcaaaaaatggtgatgaacgtcatgttaggccttaacgctgtcttagtgctagtcgggctctacttcatgaatcgcggctcatcatctgacaccggaacgcaggttgaccgcgcagcattacccctattgataccgatttttaaagttttcacgacgccgttgacaatgacgagtttgctaacctgggcgagtttaattgtcatctcgctgattttattcgcactgacaggacggtttgttttgacccacttagcggaacagcttacgcaagtcaattcagtgttagtggcaacaccaccgcgtcgacattcacgacaacataaccgcaataaaattttgcgtacctaccagtttcagttactgaaagaacccagtttagccttacaattattcacagattcaatcctgctgccattgattttagtcgggaccgttttcttttcggggaccgctcctaattttagtcggctatcgctgaactggctcggtgtctggtttgtcagtgggatggccggtgcgatcgtcaatgttaatcaaacctcattagtcggtaatctcatttcacttgataaaatgaactttgactttgtgcgtgcactgccaatcccaatgtcccgttacttacgacaaaagttttacttgggttattggttccagatcatgattaatggcgtgatggttctagtggtgggtatcgctgggcgagcaccattagccctagatttggctctaatattgggcgctgcttgggggacgtacctagctgcccaacattactttaagcgtgattatcagctacggctgacgaattggactaatgtgacccaattgtttaatcggggcggcggtaatcttggtttgatgcttaacttgttggcctgcagtattgtgggtgtgctgacaattgtgatctatagtgtgctgattcagctgttcgcggcggcagctatgctgattaatatcattgtattagttggcgtcggaattatttctgctggtttggtctggcattactacaagactttttggcagcaacttgactaataagtgttaatttcacagtcacataatattaaattaagataaaagtgttgacaaattgctcattgagttttaatgttaatgacaacttaatattcgtccatgaaaccgatgaagtggagatcaagataatgatgcccgtaaagagagtcgccgttgctgagagtgcgatcgaacgcaaattattaaatggaccactgagggcgcgactaacgaacagctttgttctactacctcgcgacgatagggagccgtcaattcccgggaatgtgtttgcatttcgctaagctgggacccaagtctaacctgaatggggtaatttggtgtccaaccaaggtggtaccgcggaaaaatccgtccttgactgtcattagtcatggacggatttttttgatagggggcagttcaatgcagcaacgatggcaattaaccacaactcaagtaaaactatcttattaatgaggagtggttcaatatgaatccaacattaccaaccttgattccttatcaggatcgttatccctacgtaccagtgatggtcaaacgaccactcgccacatttgaccccattgcggttgctaaaattgtccaccagatggggaacggtttcgcgctgacgattgatcggcaccaacgatatagctattttagttttaaaccacagcgaagtctcacgggccggcaactagccaagcacaaacgaccagctaatgagacactccaagccattctaaaccaatatcgaacaccacgaattcaaggattaccaccatttacggggggcttgatagggtacttcggctatgagtatgttcaacaatttgtacccaagttgcatttgaaatcaccagcaaccgcagatctcgatgacttaggtttattcttagttacgagtgtgctcgtctatgatcatcgacatcatgagcttgggttgacacagctgattccaactgcggatttagcggcaacttacgccgtgactcaaacggctctaacgcaacagttagccgccattattgaacaattgcagcaatcaatagctttgccaccatttgacttgcagcaaccattacacatgcaactggaccaagcgacctatgcgcgtcaggttgaccgaattcgccaacacatctacgctggtgatattttccaaatgatatatgctaatccatgtttggggaccatgagcgggtcattgctggcagtttatcagcaacttcaaaaaacagcggccccgtatacctgttattttaaacaggctaatttcgaaatgacggtggcctcaccagaaacgttagtgacgaaggatggggaacaaatcgcgacgtatccattggccgggacgagacgccgtggtcgaacacctgccgaggatcagcagttggctcatgaattacaaaccagccctaaagagattgccgagcacaatatgttagttgatttgggacgtaacgatttaggacaagttgcaaagtttaaaagtgtccgggtgactaatttacggcgattaattcgttattcgcaagtcatgcacttagggtctcgggtggccgcagaagtggcgccgactactacagcactccaagtgcttgccgctacttttccagctgggacgttagctggcgcgcctaagattgaagcaatgaccctgattaatcattatgagcaggtgccgcggggtgtttatggtggttgttttggttacttggattgtaacggtaatttggacatggcgattggcatccggctggcctaccggatgaatgaacggttagtgattccagcgggtgcgggcattgttgctgacagtatcggcgctcaagaatttaaggagtgccagaataaacaacgagtgatcgttaatgcagtacaagacgcgaaaggacgagttaaagatggaattattaattgataactatgacagttttacttataacttgtatcaactaattggtcgtctgacgcccgatgtacgggtcattaaaaatgacgatttgacggttgctgcaatcaaggcattacaacctgaccatatcattttatcaccagggccggggacgccagcccacacgggagttagtccacaagtcgtgcaacaattagctggtcaggtccccatattggggatttgtatgggattagaagtgatggtcaccgcttttggcggttcgctgcaaggcgcccagcatttagttcacgggcaagccacgttaatgcacgtgcagccgtcatcactatttaaagattgtccgatgcagttcatggcagcgcgctaccactcgttggtagctgatgcgggccgtttgcccgttaactttcgaatcattgggacaagcgatgatcaggaaatcatggcagtggaagatgtgggccgtcagctgtacggcgttcaatttcatccagaatcaatcatgacgccagccgccgttggtgagcaactgatccgtaattttttagcacttaaacattaagcagacgagagtggaggaatacttatgattgaaacagcgattgcacaactcactaaccaagaaaatctagactttacaatgagccaacaagtcattacggaaattatgaaaggtcaggccaccgacgcacagattgggagctttttgaccgccttagccatcaaaaaggcaactatcgatgaaattgctggtgcagcaactgcgatgcgttcccaggcgttaccttttaaagttaaacggcccacgctagaaatcgttgggacgggcggtgaccggtcgaattcgtttaatatttcgacgaccactgcgctagtggtcgccgctgcgggtgtaccagtgaccaagcacggcaatcgtgcggcgtcgtccaagagtggtgcggcggatgttttagaagcactcggtatcaaaatcgatctaacacctgctcagagtctagcattgctagagcggaccaattttgcctttatgtatgcgcgcgaatatcatcaggcgatgcgattcgtcgccccggcccggcaacaaatcaagattccaaccatttttaatatactgggtcccttagccaatccagctcatgctgagatgcaactactaggggtatatcggcaagctttgatggccccattagccgaagtgttgacgcgtttaggtgttaaacatgccatggtcgtgcatagccgggacggcttagatgaaatttcagcggcagcccctacggatgtgatcgtaattaatcatgggcagcaagtaacgcgaaccctgacgcctgaacagtttggactgacgcgttgtgaccatgcggctcttattggtggtagtgcccaagttaatgccgccatcacgcgagcagtactcgctggagaaccgggggcccctcgtgacgtggtgttgatgaatgccgccgcggcgttgcatattgccaagccacagttggatctagcggccgcttttgagttggcccagcaaacaatcgatcaaggagcggccgcggctaagttggcccaattaattcagagtagtcaggcggtgatggcctcatgattttagatcaactcgtccaggcgagtcagcaacgggttcagaaggtaccagttagggagcgtgtgaagcgcattcaacaagctcgaaaaatgaccacccccgttttatcatttgaagcaatgctggcccagccgggcttacagcttattggtgaagttaagcgggcgtcaccttctaaggggctgattgcggctgagtttgactatttacagattgcgcaagactatgttgctgctgggatcgatgccatctcagtgttgaccgaaccccggtattttaaaggacagttgtcttacttacaagccattgcgcaaacggtctcggtacccacattacgtaaagattttattgtagctgctagtcagattgcgagtgctcgtattgctggtgctagtgcggttttattgattgttgctattttaacaccggttcaactgcaggctttcattacgttggctcatgagctgaatttaagtgcgctagttgaagtccatacaacggctgagattaagcaagcggtggcggctggggcccggattattggcattaataatcggaatttgaaagatttcagtgtcaattttgcaacgagtcgccagttgcggcaagcggttccggctgagtgttatgtgattgccgagtctggcattcaaacgtcgacgcaagtacaaacgttggcggccgccgactttgacgctattttagtcggcgaaacgttgatgcgtgcgccagataagcagcaagctgtcagacaactgcgggcgggggtgcgtggatgacacaaattaaaatttgcggtttgatgcaaccagcggatgtcgtgatggttaatcaagcgctcccagacgcaattgggatggtatttgcccccggtcgacgacgacggattacgatggcgaccgcgcgccaactgtcacagcaattagatccgcgtatccggcgtgttggcgtgtttacaactaatcaattatcggaaattttagctctcgtgcaacagcacattattcaggtggtccagctacacgctaccgtcgatgatcctcggattgcgtccttaatggccgcccatgtgccggtgattcaagcgatgacgccagcgaatgctacgcaatgtcaagcggattacttattattggataatgcccgtccaggtagtggacaggtgttggattggaatcaattacaatcacagcgtcccgtccggccgtttatcttggctggtggtttaacaccgacgaatatcgtaacggcaatcaacaaggtgtgcccggcaatggtcgatgtggctagtggcgtcgagacggcgggcaataaagaccgtgaaaaaatcaatctgatggtccaacgggcgcaccaaacgggcgtgtcaacaccattattaacagaaattaggaggaattagtatgattaaaaatcaatcacaggcggggcgttacggcgactttggtggtcagtacgttccagaaacattaatgaccgagctacagcggttggatcgcgcctttcaacattaccgacaggacgcgcagtttcaagaagagttgactgacttgttgaataactatgcgaaccggccatcgttgttgtaccatgcacaacgattatcagatcaattaggtggtgctcagatttattttaaacgtgaggacttgaaccatacgggtgcgcacaagattaacaatgtcttggggcaggcactgttggcaaagaagatgggcaaaaagcgattgattgctgaaactgggactggacagcacggggtcgcaactgcaactattgctgctttgttcgggatggaatgcgacgtctttatgggtaagaaagacacggatcgtcaagcattgaatgtttaccggatgcaactattaggggccaaggtccacccggtcacgactggttcaatggtgctaaaggatgcgatcaatgcggccttacaagagtggacgcggcgctgtgatgatacagcttatatcatgggctctgcaacgggaccacacccatttccaatgatggtacatgaatttcaaagtgtcatcagtgtagaagcccgacagcagatcctggaccaaacaggtcatttgccggatgccgtcgtggcttgtgttgggggcggcagtaacgccattggaagttttgcggcttttcttgatgatacgtcagttgagctgattggctgtgaggcagcgggtaagggtgttcaaacgccgttgacggctgcgacgattgaacgtggtcggactggtatcttccatggcatgaagtcactctttttacaagataaagccggacaaattgccccggtctattcaatctcggctgggctggattacccgggcgtcggaccggaacatgcctacctggctgcgagtggccgggcgcaatatgtggggatcaccgatgaccaagcagtacaagcatttgaactgattgctaaggtcgaaggggtgatctgtgcgattgagagtgcccatgcagtcgcctacgtacaacaattagcaccaacgatgcgacgtgaccaaactattatttgtacgttatccggtcgtggagataaagatgtggcggcaattgcaaagtatcgaggggtgacaattgatgactgatttaacaacaatttttaaaaatcataaggcgtttattgcttttgtagtggccggtgatcctaattttgaagcgacagttgaccaagttgttgcgttagcagaagcgggttgtgatctcgttgagattggcattccgttctcagaccctgtggctgatggtcccgaaattcaggccgctgatctccgtgcgtttgaccaacacatcacaccccaacgcgtttttgaattggtggtggcaattcgagagaagacaactattccactcgtgtttttaacctatgcgaacattgtttatcagtttggttatgctgcctttgcccagcagtgtcaaagtttgaatgtcgcaggcttgattattcccgacatgccactagaagcctctggtgaacttcgaccaaccttagaccactatggtattgctttgattccattgattgcgccaacgagtgatgatgcacgcatcgcagcgattgcccagcaggcgcggggcttcatttatgtcgtatcatcactaggtgtcacggggacccggcgacacatcacgactgatttagcaacactggtggcgaagattcgccatgcgactacgttacctgtcgcaattggttttggtatccatgagccagctcaggcccaggccatggcacaaattgcggacggggtcatcgttggtagtgcagtcgtgcatttgattgcgacgcaccaaccagcgacagcagtcttaagggactatacgcgacggatgcggcgcgcattggatggtcgcacggctgatacagttgactgatcttatttgttacgatgttgttgtgccgggctacttcgattaaatgctgggaaacgctcggataatgtgctagtctaaaaacagcttactgctttgtgggcgtcgttaataatagttgacgctaaccaagccagttaaattaatttacggaggggtcaacatggcggatgtactgattattattgatctgcaagttggtgtctgtcgcgggtcccaaccggttaccaatttggcaaccgtgattgcgggtattcaacaacgcattacgagttatcgggctcaaaataagccaatcgtgtttgtgcaacatcacgatgctgacttagtcactggttctgccgattggcagatgataccagagttgccaattgaagcaaccgatattgtggtccagaaaacgcacgccaacgctttttatcacacggatttacaagcccaattgacggtgattggatgtcaaacacttgaaatctgtggtgcgcaagtcgagttttgtgtggatacgacggttaaaatggctcatgggttaggctaccacctcgaaatggttcgggggctgacgacaacgacggccaattccatgatgagtgcgcaacaaacgattgatttttatcaagatcggatttggaaccaccgtttcttgacgttggtaacagcatcgggccgtattgacgatttgttagaaaagacgggtgattagttgaaagcattattttttaatgattttggcgatgcgtcggtcctacagtacggtgaggtggcggacccaatcgttactgcaaatactgtattggttaaaacaacgtatatcgggctcaactttgccgacatttatcgtcgtcgtggtacctatcatttggaaaagcatcaaccgtacattgatggttatgaaggcgtgggaacggttgtggcagttggtaagcaagtggcgaattttaaacgcggtgatcgggtgttattcgttgacgtgccgtttgccaacgctagccttgtcgcggttccagctgatcaggcgattaaagtaccacgggcaatcaatgatcagcaggtcgctagcattggattgcagggcatgactgcggagttcttagtccatgacttggcacaaaaccaaccgcacgatcgagtcttgattcatggcatcagcggtggtgttgggcagctattaacgcaactgctcgtggccaatgaggtggctgtttatggtgtggcgtcaacaccggcgaaagctgaattggcctatcaagctggcgcaaccaccgtttttatgcgccatgatccttgggacacgacccatcataatttttttgatacggtatttgatggggtcggtaagacactaccagttagtctggcgactaccaagcaccgtgggcgggtcattttttatggcatggcagctggcaatccaccagtaattgatccagtcaagctaatgtccgaatccaagagtttgatgactggtgatttatgggattatttggacagcgcggctgctcgtcagtgccgtgccaatcaattgtttgatgatgtgctcacgcatcgcgtgacgatacgaccagcgacagtctattcattagcagaaggagccgctgcgcaccgggcccttgagaccgggcaagttgctggcaagattttattgcgcccatgaagtacttgaatcgtatttgaaattaactggtttaatcgaatatcaccaaacggcatcgggcagtttttccgatgccgtttttgtggtggattagtagtgcaggctgaatcgagcgccagttagtcaattcaacaattgaattattaaaattcccagtcatgaccacggactgttacactaagtgctaaatcggtcaaatggaagtgtgatggtcatgattcaattagtacgttattcgacgacacggggagcactgaagcaaatacaacagtatcaactggttaatgtgatgtacacggcgacgccacaacaagttattcgtgcttgcaaatctgatttagaacgaacggccgttatgattatgaatggcaaccaattagtgggctttttctgtttgcatgttggtcaaggaccgctcagttacggtgaaacggaagtgaatacgattttgttgcgagctttatctgttgatgatcgctttaagcatcagcgggttgcgtctgacgcgcttgccgaattaccacgttatcttgccagtcattatccgatgattcaaacaatattattagcggtcaatcatgccaatcatgtggcgcaacatttatacctgacccatggtttcactgatacgcatcgccgcatagatggtcgattggggcgtcaatttatttatgaacgcccagtccattgtcccatggatttaaattttgattgaaatttgcttagttagttcagtcaatctagtatttggaatcttatcggaactaggtgcgatactttagaatcgtttgtgtcgttgcgaatgagattagatttaaacgaaatctgattgaacggctcgttttacgattggctttctgttagattatgataatacgattagaaaaagccaatcgtaaattaagctaatggaagtgatggtaatggtagcaattctttctctaatggttgtcatgggttttatgatgcttggcgagtgggtttccacgcgcagtcgggcctatgttccatccgtatttattacggcactcttatttctagtgggtttttggacaattgttcccaaaaacattgtccctgctgcttcatttggcactgcctttattcaaattacccaagccgttttattggttcatatggggacgttgatggatctgaaattgttgttaaaacagtggcgcgcagttgtgattgccctgagtggcgtggttgggacagtggtgctcacgatgggaattggccgtcttttatttgattggcacacgatcgttgccagtgtgcccccgttgacgggtgggttagtggctgcctttctgatgacagctggactcaaggcccaacatattaccgcacttgtggcgtttccggtggcaatgtttgtcatgcacagcatgctcggttatccgctaaccgcgtggatgctaaaacgggagagtcgccgactattgcaagtccgacatgtagacgtcacggtcgcgaccgctgattctgccaccagtgcgacagttcaaacaacggcgcaattaccagtgtgcccgctaccaaccgtaccagcgaaggtgaaatcagttcaacctcaattacggcattggcaactaccggccgcttatgatacttcagcttttatgttatttaaagtcgctgctgtgactgggttggctgaatggactgcccagttagcccatggcacggttaatcagtacatcatttgtttagtgtttggtgttatcgcgcatcagttgggctttttagaagatgcggtgttggagaaagcgggcgtctttcactggctgatgtatggtctgctagcttatatttttgccaatctaaacattgttaaaatcagcatgttaagtggtattttgatcccgattgtaacgttgatcgttcttggtgttttagggatgtggattgcatctagcttattggcgcgaccgttgggatttagccgcgaaatggcttttgcaagtgcattgactgccttatttggtttccccgcggactatatcgtcacccatgaagtgaccgaaattatgggatcgactgcggaggaaaagcaatatttactagaccagatgttacctaaaatgttagtgggcggttttgcaaccgtctcagtggcgtcagtgattattgcgtcgatcttcttgaaaattttatagggggcttttcagatgatgacaacaactttagcagcttggatgacaaccttgcgccatcaattacacgcacacccagagttagcactgcaggaagtcgcgacgaccgctttaattaagcaaacattgactgagttgaacattcggttggtagactatccgggagaaactggggtggtggccgagattgggcatggtgcgccaatcatcgcgttgcgcgcggatattgatgcactcccaatccaagaagacaatgagttatcctttagatcaacgattcctggtcggatgcatgcttgtgggcatgattttcacacggccgccttattagggggagcgcgattattgaaagtgcatgaggtagatctcaatggtacggtgcgactgatctttcagcctgcggaggaaggacaccgcggtgccaaaatgatgattgataatggtgttctagcaggtgttcgtgcgattgtgggattccataatatgccgaatttaccagtcggcactttagcgatgaagtctggaccactcatggctagtaatgataattttgacgtcacaattttgggccagggcgcccatgcagcgatgcccgaagcaagtcatgatcccatcgtgacgcttggtgaattgatcagtaatttacagaccattcgtagccgaaatattgcgccagacgcagcactggtgctaacgattgctgccgtccaagcgggaacgacttttaacgtgattccaaatacggcgaatttacgaggcacgattcggaccttcaacacggctaaccgggatctagctaaagtacgtttttacgatattgtgcgtgcaactgccaagatgaatcagcaaaccgctacaattgattgggaccgaggaccaagctgtgtcaacaataacgcggcacttaccgctgtactatcacgtgttctgaaagatgattttgatattgtgcctgcccagctatgcaatgccgacgatgattttgcgttatatcaagaatgtattccaggattctatggattcttaggttcaggcggcaatgggaccttacatcaatcaaattaccgctgtgatgacgcaggcctaacctatggcgctcgcttccatgaattggcagctacggcactattaaagtgggttcgagcttgaattgaaagtggtcaatcgacaaagggaagacgcccgaccttgctaggaaactaacatggtcgggcgcattttttatggaaagcttctgaatgataagtaacaagcgagtttggtcacaattatctgagtaactaaagtatttgttgatacccgacttggtgcaatcagtaactggtgcgtgcagattattgttataatatatgtgtattagttttaatattattattttaatgatgaagggaacgaccgctgattgaattttggttgaggcggccaaaggtgattaggatgaaatcaacaattttcgaaaaagctggactagtatctgttcaggaagttgacaaaccaacattacaatctgatgatgatgtcattgtgcgtatcgtgcggacttgtgtttgtggttccgatttgtggtcatatgcgcatggtgatgacaaggctgcccattcgatcaacgaaggacatgaagctatcggaatcgttgaggcaattggctcggccattacgacggtcaagccaggcgactttgtcatcaccccatttacccatggctgtggtgagtgcgcggcttgtttggctggtttcgatggtacttgtgatcggcatctgggccacacaaattggtctaatggctttcaagcagaatacattcgcttcactatatggtaattgggcgttagttaagattcctggtcaacctagtgactatacggaagggatgctcaagtcattgttgacgctggcagacgtgatgccgactggttatcatgcggcacggtgtgcaaacgttcaaaagggcgataaagtcgtggttattggtgacggtgccgttgggcaatgtgctgtgattgcagctaagttgcggggtgccgcgcaaatcgtcttgatgagtcgccacgaagatcggcagcaaatggcactggcatctggcgcgaccgcggttgtcgctgaacgtggtgacgaaggcattgcgaaggtacgtgaaatccttggtggcggcgcggatgcggcgttggaatgtgtcggcaccgaagcggccattgaccaagctttaggtgttttgcataatgggggtcgcgtaggctatgtgggtgtaccacattataataaccggccacttgggtcaacctttgctcaaaatattgtggttgctggtggttccgcctccgttacgacttatgacaaacagttcttactcaaagcagttttggacggtaatattaatccgggccgggtatttacgcaaacgtatccattagccgacattaatcaggcttatcaagacatgcaaaatcgaaagacaattaaggctatgattaccattgattaatctcgactaggtaactagtcgcttaaaagcaatcgattaaaagtcgtttcagtactgattcatcgtgctgaaacgactttttcgatggcgataatttaatggtaaaaatcaatcaagcttagttgatttagactagtctttgcgttggtattagaaaaaagacatgcaaccagttgaaccgtgtcattaaagctagctggtcgcacgattgtagttggcttcgataattaaccgtttaaaagaacgcattttgctgtccgtgctgtcgcccgcttgctatactgggtcaaaaatgaggtgagcgtaatgcgagtctttacttggatcgtgcgaacaattgtggctggtgccgttttgatgtgtgtcattatgattggtttggcaccgcaaacagttgttacacattttaatagtgccggcttggctgattcattcggcagccgttgctggctagtgatgttaccactattagttgtggtcacgggtgaagtcatgattaagttagcccgtcaaaaacggcgcaagctcggactcttgcaactgccgacgctaacaggctttgaagggcagtgtttaggtgtcatggtgggtttcagcgtcctgttgtgggttatattgcaatcggaagtgcagggccggctagttagcgggggcattggcggatggtgattaggatgagaaattggcagcaggatgtttatgaattcgcctgaaattaatttcaagcgaattttgggtggtgtagctattttaaatacttagaccatcatggcttaatcaacagcgccaggcgtaatgagtgtgattttgcagttgtttgagttgattaatatcagctgttaatggcctgcgccaaaaaatggcatattatgttatgatgatgacgtgataaatcattaagccgttgcgattttctatgtaaactattgttattgaaaaacataggaggtcattgagatggcagttattttaattacgggtgcaagcagcggtattgggtttcagacagcgaaagacttagcacagcaaggtcacgttgtttacggtgcggcgcggcggttgaataaacttgaagcactagccccatacggcgttaagcccttgtcactagatataaccaatgagcagtcgcttagtcaggccgtagcaactttaattgccagtgaaggacgcattgatgttttgatcaacaatgcggggtatggctcatatggcgctgtggaggatgtttccattgatgaagccaggcaacagttcgaggttaatttatttgggatggctcggctgacacaattagttttaccgtatatgcgcgcgcaacgtgaaggacgcattatcaatacctcttccatgggtggacggttggtgagttatatgggcgcatggtatcacgcaaccaagtacgctgtcgaagcgtttagtgacgcattacgaatggagactaaagactttggcattaaagttgcaattattgaacctggtgggattaaaaccaactggggattcattgctgcggatcatttagaagcctcagcacgtcacagtgcatatcaaacacaagcgaccaaggctgccgcgggtatgcgccgacaatactcgtcgcgaatgatgtctgatccaaaaattatttctaaagctatttcgaaggcggtcaatcagaaacgaccacgggtgcgttatttaattggatttggggctaaaccgctggtacttgctaaggcgattttaccgactcgtgtttttgattttatcatgatgcatgccagttagtaggagtgattagtgtgaagattatggtttctgaacagtttcagtgttttatggcaagccttggcgttgatttaaatagcctgcttgaagctgccggtattaataaagtggtttggcaagaacaattaatgctttctgatgtggagtattggcagttaatgaacgaattcgacaaccaattgacggatgaaatgattcttagtttagggaatattactaacattaatacgtttatgccgtccttttttgcagcattagctgctaaaaatggtgaacaagcgattgcacgcatggcaacctataaatcattggcaggtccggttcatttagagatagtgaccaagccagatattgtcaatattcatattttgggaaatagtcttggcgtcgagttgccacgtttcacgattatgacggaacaattgttgttaatcagcttgttacgagtaggtacgggaaaactcatcaagccaatttcagttggtagtaagtatccgtatggtgatcagattgatgccgtgatgggcattcgacctcaacaattggctgataattgcattcagtttcaagtcacggacttacagcgggcgtttatttcggccaataattcaatgtgggcatttttgcaaccagggttagaccaacaaaaactggctattgaacacaaccaatcattgctcgcgactgttcaagcactattgttgaagaaaattcctagtggttccttctcaattgacgagattgcaacaagtttgaatctcagtaaacgaaccttgcagcgtcatcttagtactttaagcaccacatttaatgatgaagtccaaattgcgcgtcgaaccctagtggtacccttgatgaaagatcaatcgctaaacttgattgaaatcagctatttgttagggtattcagacccagagtctttttcgagagcttttaaaaaatggtttcatcagagtccatccgtttaccgccaacaatctctggggatgttcaaaaattaacaagcgttgccgtttaggttaaaagttatgggcgttaaaatcttatggatgtgatggctttagactgatgagtaatcctttaaattaatagatcgtcacaacaattgtgtttaagaatgctagttcttagatgcaattttttttgcgtgcatctaagctagtgacagttgaacagattgtatcattgcttgctgaagtcaaaacttgttagcaatttgattataaactttatagtcaaattgctaaactgtgccagttcgttgacggattatgaccgcaaaaaatggctcgtcaagaaattttcgcaaaaaaataaagctcgattagagcccagcttaccgggatttggctactaaaaaatgtaacatactgtaaattaatctgctgaaatcaattgacaagatttggccggacgattaacttaatgccattcccaaacgccgtgaaaggagcgactaactatgagtgtgttagaagcaagtgaaattatgcaattaatccccaaccggtacccaattttattcatggaccgggtggatgaattaaatccgggtgaatcgatcgtggtgacgaaaaatgtcacgattaatgagtcatttttccaagggcactttcccggtaacccggtcatgccgggcgtgttgattattgaagctttggcgcaagccgcgtcgattctgattttgaaatctgaaaagtttgctggtaagacggcttatcttggcgccattaaggatgccaagttccgcaaaattgtccgtcccggtgatgtcttgaagttgcatgtccaaatggtcaagcaacggtccaacatgggaacggtgagttgtcaggcgatggtcggtgacaaggcagcctgcacaactgatttaacctttatcgttggtgcaactgattcaaaatagaaaggtggtaatggcaattcggcgattgtcgtttgggaaagttttttaaaagcattgccgaattgtaaccaaccatgacaactaatttttcgattttagcgagtgctaaggcactgccgacgaccaaagtcacgaatcaagaactaacgcaactgatggcgacttctgatgattggatcaagcagcgaacgggaattcgttctcgccacgtcgcgaccgatgagacaacgacgagtttagctgtttcagttgcccagcagttgttgcagcaaagtcggctagcggcgacggcgattgatttgatcatcgtggcaaccatgtcaccggattatttgacaccggcgacggctcctcaagtacaggcagcaattggggctgaaaaagcaattgcctttgacatcaatgttgcctgtgcgggctttgtttatgggatgcagttggttcaccaatacttacaaccgggccagaccgctttgttaatcggtagcgagaccttgagtcggttagtagactggcatgatcgtagcactgccgttttatttggtgatggtgcgggtggtctattgattactgctaagcctaatacgaccactgggcactggctgggcggtcattacgcgacgtttggcgctgacgggcattatttaacggcgggacagcaacctcaggtgaatccgtggtcgacacggactgatggtgcagattctaaccgctgggcctttcagatgaatggtcggcgggtttatgactttgccactaagcaagtgccgcactcaattgagcaggcgttgatgcaggcacggctcgagtcgagtgatattaaagcatttgtgcttcatcaggccaacgcacgtattgttaagagcgttggtcaaaaattaaacttagctacggaacaattaccgatgaacattgcacagtatggcaatactgcggcagccagtgaaccgattctatttgccgaaatggttgcccaaaagcaagttcaacgtggtgacaagctggtgtttaccggttttggcggcgggttatccgtcggtagtgtcgtaattgagtattaattgataactgaaatcaagcatttaaaattaatttaaaaattctggaggaatcaacaatgactaaaactgaaatttttgaccaaattaaaaagatgatcgtggaacaattagacgtggatgctgacaagattacgatgacaacgaactttaccgaagacttagcacttgatagtctggacgtttttgaagtgatcgataagatcgaagacgaatatgatatcgaaatcgaaacggatgacgctttagccacggttggtgatttagttgattatgtggcgactcatcaggaaaatagcgaggactaagttatgaaaacggcaatcttattcagtggtcaaggacaacagtttgccgatatgggggccgatctttatcaaacgttaccagcgtaccaagccacgattgacgaagctaatcaagtgttggactgggatctgcgggtaactgctgattggatcgatgatgctcaacggatgccggttgcaattacagcgatgaatatggggttatatcgtgctttaacagcgttgcttaatgagtgtccgaccgtgttagcaggattgagccttggcgagtatgccgcattgattgcagctggcgtcctgccatttgctgatggcttgaagttagttgccgatcgggctagatatatgcaacgagcgggattacagcatcccggggagatggtcgcggcgttgaaggtaacgccggcactggttgcagccgcttgtcaaagtgcccaagcagtgggggttgcgtatcccgctaattacaatctagctgatcaaattgttattggtggcgatgcagctggtattcaagctgcgcgaacctatttaaaaacacacggcgttaaacgggtggtcccattagacgttgcggtggcttcacacacgccgttaatggcagcagcgagtgaggcgttggcgcaacgattacgatttgttaatattgcagcaccccaaattccggtcatcagtaatacgaccgtgaccccctttagccaggcaactgtcaaggaaacgttggtaaaacagttagtatcgccaacgcactttgcggcctgcttacaacgaattgcgacatatgaggtcgatgagattattcaagttggaccggggcatagtttagcaacttttgccaaacaaacattgccgggggtaagggtttggtcaattgaagatgtgacagattggcagaattattgtcaggatactgaggaggtacgtgagcgtggatgaagtgattttagtcactggagctgctaagggtattggtttggcaacagtcaaacggctggcagctcagggggccagcgttattttaaacgttcatcatgaaattgaagcggccgattggcaagcattaacggctgaatatccacggttgacgcaattagttggtgatgtgagcgatgatcaaacggcggctgatttaattgagaccgtgatgacaaattttggtcgcttagatggactcgtgaataacgctggtgtgacccatgatcagttattaacgcggctacacgcggaagatttcatgagtgtgattcaaacaaatttattgggcacatttaatatgaccaaatacgctttaaaagtcatgcagcgacagcgacaaggcgccatcgttaatgttgctagtgtggtcgggttacatggcaatatcggccaggcgaactatgcggctagtaaggctggaattattggtttaactaaaacgacggcaaaggaagcggctcggcgccaagtgcggtgtaatgcggtggccccaggaatgattacgacggccatgacggcacaattgaatgaccgtgtaacggcggctgccttaagtgatattccactcaaacgctttgggacgcccgacgaaattgcccaagcaattgactttttattgcaccaaccgtacttaacgggacaagtgctaacagttgacggtggcatgacgatataagatatgggaggttatccaatgacagaacgagtagttgtgactggaatgggtgcggtgacgcccctcggtaatagtgttgatgaatttttaacggggttattcgcgggacaagttgggattaagcccatcacgaagtttgacgcgacgcccactgggattacagttgccggtgaggttaaggattttcagccagaagaacgaattgaaaagaaattagcgaaaagattggatttattttccgtttatggtctatacagtgcaagtgaagcgatggcgcaagccggactaaatgaagcaaatattgacccagaacgattaggcgttatttatggttcgggtatcggtggtttaacgacgattgaagcgcaagtgatcaagatgcacgacaagagtcccaaacgagtttcaccgttattcgtccctaattcaatcattaacatggttgttggtaatatcgcgatgcaatttaacgcacagaataccagtcaagcgattgtgaccgcgtgtgcgtcggcgacgaatgccatcggcgatgcgtttgaatatttgcgtcaaggaaaggcagatgtgatcatcacgggtggttcagaagcttccgtcaacgaaatcggtattgcagggtttgcgtccctgactgcgttgtcgaaagccactgacccaacgttggcttcgttaccgtttgatcgtcaacgcaatgggtttgtgatgggtgaagggggtgcgacgttagtcttagaaacgttggcccatgcccaagcccgaggcgcccagattcttggtgaagtcgtgggttacggaacgactagcgatgcttatcatatgacagccccccgaccggatggtgctggtgccaaacgtgcaatgcaacaagccgttgcggaagccggcattcaaccgcgtgatgtggattacatcaatgctcatggaacagccacacatgcgaatgatagtgccgaagctcaagcaattagcgcgttgtttggtcaagatgtacaagtcagcagtactaaaggaatgacggggcacttattaggcgctgcgggtgcaattgaagctgttgcaacgattggtgctctgcaagcgggtcagttacctgcgaatattggttgtacggaccaagatcctgagtgtccagtcaatttagtaacgccagcaactcaacatcaagccgcaacctatgctttgagtaattcatttggttttgggggccataatgccgtggttgcctttaagaagtgggtgaatgtatgagtatgacggatacggaagcgatgaccgccctgatcaatcagtttaatcaatccagcgctcaagtcatggacgtcaagacgacaacctttgaactgcatttgaataaacaagctgaaactgctgagacaaattcagcgcgttcacagccggcagtgaccgactccgcggtaccagtggtcaaaccgacgactgaagtggcgactcaatcgggaacaacgatggtcacggcgcccctagttggggtggcttacttagctgccgacccgaaacaggcgccgtttgttcaggtgggtgatcgtgtcaagtcaggggaaaccttgtgtgtaatcgaagcgatgaaaatgatcaacgaagtccctagcccagttagtgggatcgttaaagaagttttaattaagaatgcaactatggttgaatttgatgaaccattgtttgcaattgaggagacgaccgtttaatggaagttacggatttaattccccaacggtttccgctgcaattattagaccgtatcgtagcggtccaaccaggtgtcagcgcaacagcggaaaaattagtcacgattaatgaatggttttttcagagtcagacactgaccggaagaacgatgattcggccagtattattagaaattttggctcaaacgggagttgtggctttactatcgatgccagaacatcatggtaataacgtcttttttggcggaattcggcaggctgattttaagacggatgtgcgcccaggtgaccggttagaagcgatggtaacgttaactaagttgcgtcgtcaaatcggaacaggccatggcgtgattacctgtgctggtcgtgaggttgttagtgctgatttaacctttgtaatgcaagcctgaaggaggtatggcgattgtttaaaaaagtcttagtcgcgaaccgtggtgaaattgcggtccaagttattcgcgcgcttcatgagatggggattaaagcggtcgctgtctattcagtggctgatcaggagagcttatttgtacatctggctgatgaggcggtctgtattggggcgagtcccgtcaaccagtcatatttgaatatgcaagcaattattagcgctgctaatttgaccgggtgtcaggcgattcatccaggctacggctttttatctgagaatgcggaatttgccaaaatgtgtgcggattgtcagttaacgtttattggaccgcgtcctgaggtgattgaccagatgggtgacaaagaaaatgcccggcagaccatgcaacgattaggcgtacccgtgattcccggcagtccatcggtgcttaaggatgttgaggcggctatgcaagctgcccataccttaggttacccagttatgatcaaagccgctgctgggggtggcggtaaggggattcgcgcggttagtaatgatcaagatttagcgaaggcttttcgaaccgctcagcaggaagctcaagcttcatacgatgatcatcggttgtacttagaaaaaatcattgccccggcgaagcatatcgaagtgcaggtcttagccgatcaacaggggcatgttatttatctaccagagcgcgattgttcgctacaacggaatcatcaaaaagtgttagaggaaagtccatgtgcggtcatcacgactgctgaacggaccgaattgggacaattagtggctgacgcaaccaaaaagttgggttatacaaatacgggtacctatgagtttttaatggatcagcagcatcatttttattttttggaaatgaatacgcggttgcaagttgaacatacggttactgaaatggtaacgggtattgaattgattaaagcgcaagtacaaattgcagctggtatgcctttaaaaattaaacaagcggatgtgaaaattcatggtgttgccatggagtgtcgcttgaatgcggaggatccataccacgattttcgaccgcaacctggaaaaatcacccggttgatctacccaatggggacactgggagtccggattgatgctggtgtggtgactggtagcatgattgcaccgttttacgactcgatgattgccaaaatcattgttcacggtattaatcggaagatggtcagtcgcaagatgcatcgttgtttattggaattgaccatcgatggggttcaaacgaaccggatcttcttagcaggattagttgcagattcgactgttggccgtggtacctataccacagcttatatcgaacaagactttttgaaaggatggttaagtgatgcccaagcgcaagtttcaagcacccactgaacggcagttagctgttcgacgggataatattccagacgcgttattgacgcgctgtccagtttgtcatgaagattgttatacccaagatctcggtgaattcaaggtatgtccccattgtgattatgggtttcgcttgcctgcttggcaacgtgttcaacaattgacggcgagttttgaagagcgggatgcggacctaagtgcgcccgtcagttttgatgaccctgcatatttaaaaaagttgcagcgtgccaaagcagcctcacacttgaatgagagcgtattgactggtattgggacgttagcgacttatcaatttgggttaggtgtcatggaaactaaatttatgatggggagtttgggggcggcaaccggtgagaaaattacgcgattatttgaaacttgtacgacccaaaaacttcccgttgtgatggttactgcttctggcggggcgcgtatgcaagaaggcgctcgtgcattgatgcaaatggctaaggtgtccacggcggttgcaaatcaccgaaaagctggactattgtatattacaattttaactgatccaaccactggtggtgtcacggctagttttgcgatgcagggtgacattatgttgagcgagccacgagcgctcattggattcgcgggtcggcgagtcattgaacaaaccattcaacagacaccacctgcggatttccaacgggcggaaaccttattggccaatggatggttagatcaaattgtgccccgaccagccttacggaaaacactacaacgattattaacaatcactcagggaggtcatcaggatgtctaaagtaacggcctacgaacaagttcaagcagcccgggatgctagtaagattagcattcaaacgttgattgatggcttgacagaggatttttttgattgtcatggtgatcgtcaacgggcggatgatccagctgtaatcgccggcttagcaacaattgctcaacggcccgtcaccattattggtattcagaagggtcaaaatttggccgagaatcaagctcggcattttggctgtgcgacgcctagcggttatcgaaaagcattgcggttaatgcggcaagcagaacaattacggcagccggtcgtgaccttaatcaacacgccgggtgcctatccgggtgtcgatgcggaatatgagggacaaggacgagcaattgctgactgtttgttagcaggattacaattgcgagtaccatttttgagtttgattgttggtgaaggtggcagtggtggtgcattagccttagcatgtggtgatcaagtctggatgttggcgaatagtacttactcggtgttatcgcctgaaggctatgccactattttatggaaagaatcgcaacgtgctgctgaagctgcggaaaaaatgcgcttgacgccgacagaattattggcagatggaattattgatcggattattcctgaagtagcaaccgcagcagattgtcaaccgctgaaaacggccattgacgagacattaactgctttaacagcaaagtcggtgacggaactggttacgcaacgccaagcccgttatcggcaattttaaataagtgaggaatgataagtatggatggaattttatcgggtaagactattgtggtcatgggtgtggccaatcagcgcagtattgcctgggggtgtaccgaggcattaattgcacagggggcccaggttatcttgacttaccaaaatgaccgtttgaagcaaagtttacagcggtttgttgcgccagatgtgccgttaattgcctgtgatgttgctgatgatgacaatgttgatcgggcatttgcaagcattaaacaacagtatggtgccatcgatgggattatccatgcgattgcttatgcggataaagcaacgttagaaggtgattttgtgaataccacgaaagctggatatgatttggcacaaaatattagtgcgtattcgctgattgcagttgcccgagcagctcggccaatgctgaaaccaggagccagtctcgtaacgttgacgtattttggatcagagcgagccgtaccaaattacaatatgatgggggttgctaaggccgcgttggaagcaaatgtgcgttacttggcacgtgaccttggaccacaacaagtccgcgtgaatgcaatttcagccggagcagtcaaaacgttggcggtaacgggtattcatgagcatcagcaattattaaaattatctcgcagtatgacagttgatggagaaccggtaaaaacgcgtgagatcggcaacgtggctgcctttttattaagcgatctctcgactggaatgaccggggacgtggtatacgtggataaaggggtccacttaagttaatgccaatcactcaagttgtctttaaacggcagtggcttcagatgccggtcgatgtttctaaaaaaatgcgacgggtcactcagcgaaccgtgagtcgccaattaattcagcaagtgttatcggtaccattagcttatcatcgattgggccagccctattttccaagtcatcctcgattaggtgttagtgttagtcacacgcaccagttagtgatggtagcggttggtccgggacctctggggattgatgttgaacaggtccgtccatatgatgtgactgccattcggcgagcctttacatcggcggaatggcagctattacaggctttatcggtgcaagatcgttatcggttagggtggcaactttggacggctaaagaagcggtattaaagttagtgggctgtggtttgacccatgcgcccagccgtgttgaggttcttgatttagaacgtggactagcgtgctatcaaacacagttataccagttgacgccgttagaattgcctgcgactcacgagggatttttggctcgtcccttgtcgtttggctgattggagcgtgttgttggtattaactttagtgcgttcttttttaagtttagtgaacaatggccactggattttattatcggccgactgggttgacctgctattgcaagccttctacgtgctgactaaaagcagttctgagcaagccataattgtgggctcagaactgctttttaatttgtccttcaataatttatctataataatggcaatacaaaattcatccataaccatgaaatcggcatgataacgaccatcatcggaatcatatcggcggtcggaaacatcttgacggcaataatgcgaaagccgctggcaaccattaaaataccaccgaccgctttgaaatctagaatcatgtcaggagtggtcaagggaaagactaggtgagcgattaagaataaagcagtcaggatgattagttggggaacagcaattaaggaaacaactaaccctaagttagcaccgaaaattaccgcagcaaagaagtccagaatcgatttggaaatcaaaattgtggcgtcgccgttcatcccttcagttaaagtcccgtaaataccagttccactggcacaaaatagtacgattaccgtgaccattgtctgttcaaaagcctgtttctcaaaagttgctggtgctttgacaaaccgtgaaatgaaacgttgcatcgcggcagcgccgtgattgattgcagttcccaaatgacaaagtaatccaatacctgttccgataataacggcaaagatgaccgccgctagattttttagtggtgcaatcgcgtaaatccccatacacatggaacagatcccaaaggacatattcagcccatcttttaaacgttgtgacattcgtttgccggtcaatgcgccgacaatacccccgaaaaagattgcacacacgttagtaataattccaattggcacgcaagccctcctcaatatttaattgataaaaacaacagctattagtttagagcttgtttcggataagaacaattctgaatatgtggtaaactattctaaatgggaatagttagaagagggttaattatggaaacacggaaattggcagtgtttgttgaccttgccacgacccagaactatagtcgcagtgctgaacgcatgtttttgtcacagtcgaccatttcaaagtacattatggctttagagcgcgattggcaggtccaattatttgaacgtgcgcatcggcaagtcacgttaacacggattgggcaacaattattgccacgggcccaagcaattctgcgcgaagagcgtcagttacaacaagttctggccgctaataccgctcataatgcgcagtcgctggttgttcagggactaccatctttagcacaataccaggcttttcatattatcacggcatttacgaagcggtatccggaagtgaaattacaatttagtgaggcgagtgtcgatcagttagcgcatgcactggatcatacgaatgtcgacattgtatttacacggattttcggggatcaacccaataattatgacgttttattgaatgagaccgatcagtttgtggtccttgttccgaaagacgatccgttggcgcaacaagctgagattagtctgtcgatgctggcacatgaatcaattttattattgaaagataccatcggtgaagataacccgttgttttcggcatttcaaaaaatgcatacgccacagatggtctatgatggtcaacgaattgatctcattttagaaatgctgaatcagggtgatggtgtctcggttgtcatggcgcggtcatttgatctcactggttttgacaacattaaagcaattccactgacgcctactattcgcagtcagatggctttcatgaaacgtccagataatcacgctgccgtggttgctaaattttgggcgtttgcgacgaagtatagccaatcactttcagattaattgtggcggctgatcacattctaacgatgtgtcttgaatcggaatcaaagccgacgatgacataaggataaaagcagtcggtttcggtggtcgtagcaggaaggacgtgtccgaacaacaaccgagctagttagtctgttttaatcacattgtaggtcgtttgcagtgatataaataaaaataattaaagatgacggggtgcagacatggaaccaattcatatttcacagactttatcaattaccaatcaccgtgtgttttcagctgatttgaatgagcacgacacggtttttggcggaaaaatcttggcgactatcgatgataattcatcgattgccgcatcgcgagtggctcgaattgagacggtgaccgtgtcagtcgatcaggtcaattttttattgccgtttcggttacaagactcaatgtgtgcggaatcttacgtttcgggcgttggtcaccgctcaatcgaggtatttactaaaatcattggtgaacacttgaagactggcgaacggtttttgggattgacttgcttttcaacgttcgtggtgacggaccgtaatattgaattaccactgttagtcgctgataaaccagaatacacgtttgttgctcagggctatcaagagcggcaggccgcccggttagccaaactaaagcgccagcaagactttaatgcgcacattagcgttgaattgccgtggtgaatcgatttaaattgacaattttggtgagacttgttaaattgtaattatcaaatataggaggggtgttttatgtcgggcattcgttagggtgttgttgagcgaaaaaagtgggttggacccgcttagtttcgtgtaccctaatgtgacgaatggcctggcagatagacatgccggacggtttttgcgcacagttgggataagactgtgcgcatttttaattcgcagagcgttagggtaagtcactttgcgaaaggattataaaaattgacaattaatttaattaaatatggattgacgacggcggttcaagccgacttgactaaggaaaacggtcaaatacttggccggattatcggccaacatcgtgattggtaccaagtcatcacgacggctggggaacgttcagcacaagttacgggaaaactggcttatgaagcggccagtcccgcggcatttccggcggttggggattgggtgtgcctatcttcatccgctgataatcaggcgcagattgaagcaatcgcgccacggcagagtgtcttggcgcgcggtgccgtgaaccgccaagacggccaaatcattgcgacaaatattaataccatctttatctgcatgtcattgaacgcggattttaatgtgcggcggttagaacgttacctgacgattgcgtgggatagcggtgcacttccggtcattgtcttaaccaaggcggatctctgcacggatctagccactaagttacgggctgtggcggatgtcagtgtcggcgtaccaacgatcacttgttcggtcgaaacgggtcagggtttggatgaattgcaaccatacctaacgactggtcaaacggtggccttcgtgggctcttcgggtgtcggtaagtcgactttgattaaccgattgttgggccaggatatcttggcgacgaaatcgattcgtacagatgatgacaaagggcggcacacaacgacgagtcggcaattaataccgctaccaacgggcgcctgtgtcattgatacaccaggaatgcgtgagttacaaatcttcatgggtgatttaaatcaaactttcgcggaaattgccgcattggcgacacagtgtaagtttaatgattgtacccatactagcgagcctggttgtgcggtacgggcagcagttgaggtgggcacggtaacgtctgaacggttacaaagctatcaaaaattacaacgtgaaatgagctatcaaggactcaattcacgccagttggagcaggctaaaattcagcggatgttcggtggcaaacaagcgatgaagcgtgttaaacaacgttaccatcgcgactgagttgataagtaaattaaagaagctactaaacgggatgtcggcaacggcaccccgttttatttaggacctactttcgttatcgcgtagagtgaaccgagtgacctgttgagcgagataggccggtgtttcaaccatcccattctgttgccaatgaacgagcatattgatgaccgcaccagaaaaataagccgtgtagtacggttggcgaagcgcggtattgcttgaaccgataatacggtcttgtttaatgagtaatgcaaagacggcttcgaaactttgaataaaaatctgggctttttcgtttttgatcaataacgcatttgtcgctgccatttgttgcatgagagtgaaatattgagtcatcaatacctgcaatttaacctttgattgtcgcggtaattggcgcagatattgaaggatgtctgtttttgataggccaaaataatctgatcgaagttggcgaaattacggtaaaaataggtgcgagaaacctgagcgtgctgacaaagttctgtgattgaaatacgactgagtggtttttgcgacataagctgtagtaaggccgcataaaccgcagttaaattttggcgttttcgtgtttgtgggtccattggttacaacatctccttttttgtaacgtaagtatttatttatgaccattttaccagatatactcccattaacttaacgggaggcgattatgatgaaaaaatcgacgaaagtaattgcaatgatgatgattggcatttttctatgtatgcttgatacgacggttatgaatattgcgttgccagcaattcagacgggactaaatactgatttgacgcacctgtcgtgggcactgaatatttacaccgtcctgtttgctagtctggcgattccactcggtcggttagcggatgtctggggacgtgggcggatgtacttgattggactcgggctctttggtattggttcactaacttctggattgagtctcagtgtcgggctgctgattactggccgagcgattcaaagtattggtgcggccatcgtcttcccggctagtatgacgattggtattcagagtgttgcactcagcaggcgtacgggggtcattgcaagcttgggcgtgatgcaagggctagccgcagcgttaggaccaaccattggtggtgcggtcactcaattttgggggtggcggggaattttcctgattaacgtgcctttagttgccgtcgcgttgtgtggttgcatcgcctggctatcatggcggcaccctagtcatggtcaagtaaaactagacctcggtgggagtgccttagtgatgacgaccttattggcattgacgttggtcctggttaaaggtaatgactggggatggacgagtcgcgtagtcctgagcctgggcgtcactagtgcgctaacattgattgcctttgtctggatggaggcccacgtctcagcgccgatggtcccattagccctatttaaagaccgacagtttaacggtgcggcgttagcgaccgtgttatcaggggtctttatggtgggactattagtcttgatgccgagtttcttcacgaaagttcaaagtaagacggaattgatggcggcgattatgattacgcccgcttcaatgatgatttttattttttcaccaatcagtggtttcttgttagcaaagcttggtgcgcggcgcgtgatctttagtggtagtctcgcaatagctacgggttatggggtacttagcttgatgagtcctagtcagtactggcagtttgcattggcggcgttactggttggtgcgggctacggcacgattattgggccaattacggtattagcggccggtgattttaccggtgagttactgacagcgtcacaaagtgtgattggcgtgtttcggcaaattggcacatcgttggccgtagccatttttgtgtcagctttagccgctaatttgacaacggctaagacacagatacgaacgtatgcaacgacgacggtcactactttatcaattcctaagcaagccaaacgtgatacgttacgcgtggttgaccaccaattagcaactgagcaaaccgcgcaaacggtccacgagccaatcacggcggctaaggcccgccggttggttgctgccaattatatgcaagtgttaaaagcacggtcattgcagtccgctccagtgcgtatcaaagctcaaattcatcagcaggtggcccaaaaggttcacagtcaagttaaacacactaatcagcgaataaggactgctgcatcagcgattaaggccaaaaccaaaattgagttaactgctgcgtttatgcgcccctaccaagtcgcttggccattcacactattgctagtgatgacgacctggtgttttgcgggacgggagcggaaaagtggcaagccgagttaagtcacgttgatggggatggacttcaggcacgtttgaatagctgagccgggagggccgcgaaggtgattgccaccactgactttggaacttgccatcgaacttagatttgcgagcatgtgaggcgcttatgctataataagggccaaagggggtagtcttgatgaaagaaaaacaagtgtttcatatcaatggctatattggtctagtgttagcgatcgcatttgtgttagttggcggttggctggtttgggccggtgcgactggcgatcattttgcgagtatctttttgggcgcattgctaattattattgcggcctttggggctagttcgctaacaattgtgggccccaacgaggcgcgcgtgttaacattttttggtaagtatatcgggacaattcgtgattcagggctgtttatgaccgttccgttaaccagtaagttttccatttcactgcgggtccgcaactttaacagtgccattttaaaagttaatgacctccggggaaatcccgtggaaattgcggccgttatcgtgtttaaagttgttgataccagtatggcactctttgcagtggatgattatgaacaatttgttgagattcaaagtgaatcagcggtgcggcacgtggcctctgaatatccatatgatacgtttgatgacgacaagaagattacgctgcggagcaatccaaccgaagtttctgaccggttaatggaagaacttcaagaacggctaaatgttgcgggggtcgagatcgttgagacgcgcttaacgcatctcgcatacgcgactgaaatcgccagtgcgatgttacaacgccaacaatcttcggcaattctatctgctcgcaaggtcatcgtggaaggggccgtttcaatcacggaagacacgatcgcccgtttagagaaagatacggggatgcagctatcagacgataagaaactgcaactgatcaataacatgatggtcaccattatttcggagcggggtacgcagccgattgtgaatacttcggaagttaagtaggaacgttgatataacaacatctataagataataacaatcaaggcgagccttattttttaaggcttgcctttttttccgtaacgagtgccgtaatgttttggcaatctttttgttaaaaacgatgaatttcagtaaatttagtttaaaaatgtattcagtttttttactgcgtcttccttaatttttggcgtgatttccgcgtacaatttggtggtctctgaatcaacgtgtcccattaagtcttgaatgtcgttaatatctacgccagcttcgcgtaatcgtacaccataagtgtgacgacacccatgaacgtttaaacgaggaatacccgcacgatcacagattctgggcatggcaacttgtgcagaagtaatggccagagggtaaccgtgaaactttcccgtgggcttgataaagatgaagtcattcaagtcaatatcagaccgattgagcttaattatttcatttggatgagtttgtttaaatagatccggtagtgcatcataggcgcaatctgttaaaggaatcttccgaatactttttgtcgttttgggcgtgtctagcatcatatcttttaatccaatgtcatttaccttaacttcagagttataaatgcgaatggtgtcgatactgattatgcaatgcttgaagtctactcgtgaccatctaagagccagatcttctccaactcgtaagccacagtcgaacatgagtaggaaaaaggggtaccacaatgatagatgttccaactgagcggcctataaaaatttatcggtttgttccttagtgaaatagcgcatttttctaacctcgtgacgatacttgcgattgaattctacatgtcgagtagggttaactttgatgtaatctaagcgtacagctttctctagggcgtttgagagcgtctgattgatggactggactgtgttccaaccatatccatgtttagaacgtccagctccttcttccatgaaaaggttattgataaatttctgatgaacattaaacgaataatctttaagctggtaatcaccaattcggggattgatgtagaatctgatattccgacgatggatttgaatggtatccacctttacatttacttttaagttatcgatccagtacatcagatactcgcccagtgtcatgttggccttgctattcgataatcggttgttagccacagcttcggcctcaattagcttagcagcatcttgggctgctcgcttggtttaaatccttgccggtgtactggtttttgcttaccggttccagtatccatgccttgataagccataaattgccaacgctttttactaccaaaatctgttgtgtattcaggaacgaattaaataggatcaaagacattgtaatttagagcggcaaagaatggcattactatcgcatttttggaggcttcttcagttttcaacatttcatgctgtcgccttttttgacaaactatttattttgctttcaacttcactgaaaaaaagaaaattttgagttagaaattggtgatatcaagaacggtgagtttaactttaagttgaaatattatgtctatcaagtcgaaaaaggctcattaagtgagaccataacaattgaaattaatgttactttcaataaaagcgactttgaaaactggcctacctatgatcctgcagaatcacttgagaaaacagtaagagctatgtttgtgatggccgcagttatttcaatcggagttgtagttgctagttcatcgcctgttacgggtgttgccgcaacatttttagcgcttgctacaaatttcttaacaaataataaagtataggttaaagaaaaatttagatgaaaaatgaacaagatgagaaaccaaaattagtttctcaccttgtcttttttaacgctcagattcctatactagaaatcctataattgccattacgaacaatgcggaataggatttcaaatggtacctaactaaatctttgtggtcctgttcgtttggtagtagaaaagcttgtttttcaatgggatgctcatgccaaataggttgttgtctccaaaaatcatacagttgttggggaagtgctattgcaggtggaattgccattataaagcctataatggctggccagaatggggttctgctatttccgaaagcaattacgtaaaagctccatataagtgaaccataaaaacaacatttagcaactgtaaattctaaccagaagagtagttcgttttttagggaacttctacgatacgtttgaagaacttttttcttgagctgcctaattttgcgacgggagtcgttctttcttagaaaaagtccccaaaaatatagctcgtccgatctggtatagttcataattcttttttgaatcttaatgacatatgtgagtaagataaactcaactaacactgccaatcccaataatagcaaatttctccctccttaaagagctactcttatctcatctctgatagtgacttatcatgagtgttagagatatactatcgctgattttagacgctgaaaccttaacagttaagccaacgtggtgtttattgtattcggccacgataactgcctacatgtataaatgacatggtatcatgccatttatgtatgtaggttgctaatgactcttttaattgatggttatgttggttttctcaaagaggccaactttaactaggtaacaattaatgagatcatagcagcacttgaacctattaatcaagaaccattaatttctccatttaatcaatgtgtagctatttgttgttatctttaatttttttatgtaaaaaattatgtctatccgagataagcgtaagtaattctgtcagatcatcatcagtagcatagtctcgaatgaagcctttagccgtagaacgtttgacaatgtatttttttctttccttatttttctcgtcccattttttattagccttaatgcgtgcctcacttagtttttcacccattataatttcaccacccaatagatagtaacaatcacgattacagccaacaatccccaaagtattgcatctttccagtcacgcaaattcagttcaagttccacattaatatgtttgcgatggatgttgatgagtttcattttgctcactcctttgctataataaaagtgtaataaagagggcgggcgagcgccctccgtgaaagaattaccaatcaatcgaaattttgaagtctatgattatcaagtgaaccgcaaattctaacttgatatgaatgggcttctttttcatatgacggggaaatttaatcacctcctctttagtacatcaatcactttacacgttatgacgtgtaaagtcgatgaataatttcaaaatatccacgcggtttagatgtgggcatagacggatagttctcgggtagtagaaaatcaagaaaaaagagaaatttctgccgggtgaggtccgacatctatcagttatgcaagttgactcgtatttcatttttattttgtggtgaagaaatcatgttgaaatagaaaaacaatcaatccaaaattgtaaaaagagcctgtttagggtgccttgtaaaggcagtaaaacctagtaatagaaaaaggctagatggtcaccattatttctgggcaggtactcagccaattgtgaatacttcggaagtcaagtaggaacgttgatacaacaacaatcaaagttgtagcagtaacataaaaggcgctcagcaaatgagcgccttttatactacagttaagttcaaacagtaacaaaaattgacatcatgacccgctaatcttttaaaaagatgctccttttggggatgccttcaatgggtcaaatcgtagctggaacactctttatgaattgctagggttactttccaacaccgctcatggcaattaggccataccaaccgtgggcaaacattttatttgtagaagttgttaagttggcaattaactgatcttgttcagatgagaaatggtattttttagcgacagccatcacttgaagttgaccgattaattcattgattgcgtcgggtatttgttgataacgcttagtaactgaatctggttggttgatagttgcgtaggcttggctaattaattttctgatttcaactttttcaattggaactgaagtgtttagcagttctaaaagctgattaacagttgttaaacgcgctaatttctgttgctgtttcatcattgaatcccccagtgtagtgtttagtttgaataaatgaattagttataaatgatatagacttcacgttactactatataggctaacatacaaatgaatactgtactgcatcagcaatttagtttttatgttaatttagttgtccgtttagataggctttgccaataataataattaaccctattatgattaataataaactaacataattaagtggccgacttttgctctgatagtgagtgaaccagccatacttgatccgggtgttaaagacattgatgatgaggccaatgccagtgacgaggccgccaattgcgataatgaaatccatttgtaatccctccatttagtttaagcaatttagatgtaatgactgcagtaaatattgatgctgaacaatctcgatgtttggcaacagaccttagttcttggtatttaaaaaataggtcattctgaatttaacattagtagtttaagattatcaatataaatattatgaacagcataattttcagtataaataaaactgacaatcattgctattattagaaataccgtttgcggttcaatacaggttcagtgaaataaagacaatcaatcttccagaaaatcaaattcaggtatataatgtttcatacacaaaacattatataggagactgttatgctagacaaaatcatttataaaaacttatttagtaaagcgttcgatattactattgaagtcacttattgggatgggcaaattgaacggtatggtaccggcatgccagctgttaaagttcgattaaataaagaaatcccaattaagctattaactaatcagccaacattggttttaggtgaagcatacatgaatggggatattgaagtagacgggagcattcaggaattaattgcctctgcttaccgccaaaaagacagttttttgacacataattcatttttgaaacacttgccaaaaatatcacattccgaaaaaagcagtacaaaagatattcaaagtcattatgatatcggcaatgatttttataaactatggttagatgataccatgacctactcttgtgcgtactttgaacatgacgatgatactttaaaacaggcacaactcaataaagtgagacatattttaaataagctggcaacccagcctggtaaaagattattggatgttgggagtggttggggaacattattatttatggccgcggatgagtttgggttagatgcaacgggtattactttaagtcaagaacagtatgattatacacaagcgcaaatcaagcaacgtcatttggaggaaaaagtgcatgtgcagttaaaggactatcgagaagtcactggccaatttgattatgtcacctcggtaggtatgtttgaacatgttggtaaagaaaatctagggttgtactttaataaaattcaagcgttcttagttccaggaggtcgagctttaattcatggcattacaggtcaacatgaaggtgccggcgttgatccatttattaaccaatatattttcccagggggctatatcccaaatgttgctgagaatctcaaacatattatggctgctaagttacaattttcagacattgaacccttgcggcgccattaccaaaagacgttagaaatctggtatcacaattatcagcaggtcgaacaacaggtcgtcaagaattatggggaacgatttgaccgcatgtggcaattatatttacaggcatgtgcagctgcttttgaggccggaaatatcgatgttattcaatatctattagtgaaagcgccgagtggaactggccttccgatgactcgccattatatttatgattgatcttgtcggttctgcggtagtcgtatcgaaatatagctccacaataaacatgtagtttcattgatccctcataaaaacatgagggattttttattatggatctggaatgatagacaagggcaaccattccagacttgttcagtattaggctggaatcgataggcatagaaaagatttcgggcctctgtgcatcttggtggctatcatgttgtcagggcgttatagtgacaattgaggaggggatcttatgttgagcaccaagaagaatcatgtattacggtacttatttattatagttggtatgatgatcgcgtttttaggttgtggcgtgattcaagtttcagcacatggctttgtgacgaacccgggtggcagagcttatctggggagtacttggtatccaggtgggcctttgaataccaatattggttcggttatgtatgaaccacagagtattgaagcgccccaaaatacatttattgatggcaaaattgccagtgccggtattgctaactttgcaccactggacgagcaaaatgccaaacggtggtataagacacctgtgaaggccggcaatcttagtgtgacttggcagttaactgctcgtcataaaactagtacttgggattactatattaccaagcctggctggaatccaaacgcaccacttaagtttagtgatttcaagaagatagctagttataatgacaatggtgccatccctagtgaatttgtaacccatcaagtcaatatttctgctaatgaaaaaggctatcaagtgttactcagtgtttggaatatagcggatactggtaatgcgttctatcaagtctcagatattgacgtacagtaattagatgaggcctaaatttactttgaggtgattttagactataaaagttgtctttgagatatcgtaaaggtcttactggcgtttattggctagtaagacctttttaaatgtgctttaaggattcatagaagcgaatggcgatgaccggtctttactgattagtgaagaacaggttgctattgtaaattagtggtaataattaagcggatgccgggaatcagatttgcgattacagcttggcagctggcattttagcattaaggagtacgcgcaggagcatcccctcaatgcaagttagttgaaccaaggtggctcaaatttgtgattcaataggtgactgtcagttgcgctcatgtgactacagtaccaagtcgttagtgatccatccgggtaatttcaggctcagttattagatactcgttgatatgagcgagaaagttctggaagtgcggtgttttattatggaaatccacggcggcttggtcttgccagtgctcaataatctcgtagtcatggtcatgacctagttgtttgaagtggccgtagaaaccgttgccgggttcttgtgatgaattgaccactagctcatgaataaaggcttcatactgagtggttaactcaggcttgacgtgtagtgcgacattaatgactttcattgaatactccccctgttgttcgtgcttgcggactgataacctactcggtgatgccgataaagccgccaaagcattgaagcgactagtcgtcaccatcttactgtaataatcttacaaaaagaatattctgattatatcgtacgagaccaggattttacaatgaaaacaggtatcaattatgcaactgcatctgattaattactcatttatcaaggccgattgatgcgggcgaaaatttaaacgaattaggcggtatatcggggtatcagtgacctgtacgattatcattttttagtaataataaccagcagatgtatatttatggatttgtcattcaagacgcggtatattaacaatgttaaatactaattcctagggggtggacaataatgagtaaagtttatacggatgtgttcaacatcaagcatacggattgtacggtagtcgataccatcaacgaatttagtcgaatttttattatccaggataaacacggctcacggtttacgtgtctcaaagatgatgcccgcccagctaaaaagggtagtggccattggacgagtgccagtccggaagatgcgccacaagattacgctgtgccgtatcgttcaagaaaacggcaacgtagaacgctttaaatagttgattggtaatcagtgccgatacacggggccctggcggtgacaacaccagttaagccgcgttaaaactttaatacaataagataacggtcccatcagtaacaatgactgatgggaccgttatttgatttgcgattatatttaatttaataatgcgacgcctaatgtcaaataagttgcaaaacagatccagaccaagtaggggaccatcaaaattgcggctagccgactactgcgatagaactgtaatatgcaaagtaagacgactaaatcaagcacaatgataatgactaagccccaccaataagccgactggttgaaaaagatgatgctccaaataaagtttagtaacagctggataccaaacagggtggcatccatgaggcggtcacggtgtgtcgtagcctgctggaaaactaagtaaccagcaatcgcaatcagcgcatataggatcggccaaacgatgccaaagaggccatctggtggtgatagtactggcaagttgagcccattgtaaacggccttaatgtctcccgcgagccatgccgacagaccaccgattgcttcgacgaccacaatgaaaatgagcagatgaagccaattgaatttagggcgttctttgatcattgatttttccttccttctattagtcgtctaatcagggtcgtcaattgtgttaatgactgtcacgttgacttccgctttttgtacgacgtacgcggttgttgagcctagcaaaattcgagaaaccgcgttggtgccggatttgcccatgacgattagatcaattgcatatttttggggaatatcagttgcaatgctagcttttggtgaactattaacttgaattggtagggattcgacttgtgctgccgaagccatttgctgaccacgatccagaatgtcctgactattatcttttgcgacttttagaaggtttgtatatagcgttcccccgtaagctgcaggactatacgcattcaggcgtgtaatatcaataacattgaccagaaataatttagatttaaacgtctgggctagtttgaccgcgtgttttaaagccatgtaggcattatcagagccatcaagcgggactagaatattttgatacatcctcaggacctcctaaatgaaatgatgttatttattatattaatgataacattcacataattagtgcgtctattaatatgattaactgccagcgctcagtcacaaaaggcgcaaccattatgggccgcttagccaataaaagttgcgcctagttaaattattgccaacgatttgagcgtgacggcaacaccattaagatgaagaaccaaatggtcccaattattggaactaagtcaattaaaatccaccatgcagtgtgatcactgtcatgcaatcgccgaaacttcaacgagagtgttcctaaccaaacgattaatgcgatgagtttactcatcgtattaacactcagatcgctccaattgtaaatatcctcgatggggtgtcccataatcatctgaataattgcaatgataataccaccaagaatgtagttaatgataacgggccaccagtactcagagcgtgttgctgtacccgaaaagtttaaaagattgtcccaaaatttgcgataagcagatgccatcgtaatccccccaataaagttatgatgtgaacattattattttttccctgtgttaattgggattaattaataactatgtttaactataatcaaaaagttaatagtacgcaatcaatatgttgattatattaataaaaaatacgtcgttattcgatgactgctggtacgatcaattcgaagcggtccgtcaaataggtcaattcaattggtagtttaaccgctgggtcgccgtcaatacgtgtcgtcacggcttgaccagttgcactcgtaattcgtgcactggttgccgttagctgtgtaatggccttggagttttgcaagttccccgttagtgcgaaccaaaaatatggaattacttgccgccagccaatgttgttaagtagactaatatgcatttttcctggagcagacgcgctatagacgtgtccaccgactgatttggtcgttgtaatcaaacagaaccatgtttttaaggtgtggcttccttcgtgtttgaattgatatcgaattggcagtgacttattgtgaccaatatggcgaatagcacggtaaagatagcttaatttaccgaatcgctgcttctcagattgtcgaacttcattggaaatgtcagccaaattaccgaatgtcagtgaactcacgactgcccggcgttgattacaaactagcatgccgactgcttgggtcgccggctgagtacaaattagttcgatggccgcttgggggtcagttggtaactggtagcgggtggcaaaattattaaccgttcccatgggaataacgccgatacgaatatgtgcttcagcttggattagggctgtcattgcaacgttcagtgtgccatctccaccaataacaattagtgctgacagttgaggaagcgtttgcttaattaacgcaattgcccgggggattcctggtgttgtcagtaattgagactcaatgccgtggttcgatagcgcttgcgcggtttgatgggcgacggttgccgcttgcccattacccgcttgtccgttatagaaaatgccgtaagttgttgccatgacaatcacctcttgattaaaaaattaagtttattcatcgcttatttagtaagcttttgatagtctcagtatagcttgaacactagtttgactggaaatgatatgcatcattactgaattagtcgggtcaatgagcattttgattgctcaatataaatattatagttatgataattttaatcacacaatatcgggatggagcgtgttcacaatgggatggataggtgttgcgatattaggactaacaataggtatcgttgcaaatgcggtaggcgcacatggtcggcgtcaaacgacaattaatttaatcgcaggcttattcggtgcacttggtggccagctgtcttttggatggttcgggccaacagttgctggaatgacgttgttgccagtcgtgagcggggcgatgatacttattgtgatcggaaccgttgctgcccaggcgcttcagccgcagtaattgtgattaggcataaaaggatttgttgaagtagcacttgttagcgttatcaaaagatggaggtgtccgtaatggctaaaattaaacgacagacccctggtttttggggtaaattgtcactattgattgcaattgggcaattaggattgactgtgtttcgagaagtgcggcagttcaaacaccgccgctaaaaaggggatgacagcatgcattggttatgggtaatgattgttggcgcggcggttggtgcttttgcaggtgctatcatgagccccagtcaatcgcggggttggatcggtcacattattgctggcgttcttggggcactcattggtgaaggtgtgctggggccgatggggcctgagttagccggaatgactgtgataccagccgcaatcggtgcaattgccgtcgttctgataatgatgttcgtggttcagtgggcacgggttcgacggtcaaaacacaattgaacagtgccaattgacagcctggctgttacgctcggcatcaaaaaatgttaaacatcaccctaaacaagccccacaggtgacttcgaggtactagcttactcgaagttgtttttgtgtgcgccgatgggggctctcatttgaagtggcgtaatcataaaaaaacggatggtgattttgatcaccatccgtttgcgccgtgcccacgacaaattttaatcgtcagatttcttcttcattttatccttagcttcatccacgacgcccttaacagtttcttctgcgtcagctaatttgtccttagctttgcccattaaggattgtgttttgccctgggcttcacgtgcacggtccccggttactttaccttcgacttctttggccttgccgctcaactggtccttcttgctatcgaacttcttgttaacatcactcataaaaagcgcctcctaatataagaattaaccttagtttgcgataagtgatgacaaaacgcaaccaatatgcacaatgctcataaccactcggtcagaaaggcaatcagtagggcagcaaagttgatcagccaaatttgttgtcgctgggggagcatgattgtcggatgatgtgtcaaaacgatcgtgttcaacaaaaccattaaaataatcagggcgctgagcccgtaatttgtagcgatcaacagatggtcgctggcaatgccggcccaatgagtcagggcaaaaatcaagtttaaaaaacacgcaattaagatactatggcgtagatactttaacgtggtcatcaatggtaacctcccttagaaataatcatgctgatggtttctaagaaaaaatacaccattgccaggctaacggcgtgcaccgagttttatttggatagtaacggaactaagcgcattttgaccagtccgaaagccgtggcacattaataatggttaccctcaaaaacggatagggggtgtgatttataggtttaaatcagtatcgtaattcaacggtgacatatcggtgcttttagttatcaggtcagcggcgagagcttgcattgtgttcaaggcctggtcagcggctttttgattggctttggtcagtgccatagcgagttcgtcgccagtcaaagcggcaacttgctgatccgtgacaataatgtggtgaccaagttgaatcgccaattccttttgtactgtttgtaattccccgtgtagttcatggtagtgggcgtcgactaggataccgacgtgcttgaaaatccagtatgctgaggtagcatcgtatttttctgtagcaacttgataagctgctggagtggtcgtagcaccggcatagaatggaacgtagacactttcagcggctacacccatcgccagccagtgaatcccactcagcgtgacgggaaggtccggtcgcaattgtaagacgtgtgattcttgcgtcttggcgagactgatgggccgatactgatgtttctccgtagcagtgccctggccgacgggatcaaacggtgtgccttgataatgggacgctaagtagccttggacttggtcaatatgaattaagccatccgcccgttgaatgaacggtaagtcaaacgactcaggcgtctgggtgacacttggtgtaaagcatctttgaccataccaaacgcgaggcgtgttgtaatatcgatcagaaaggtcggccgtaccgaagacttcccggaaattcagtccattgtccattgaagctaactgattgtctaatacaaaattacgaatgtctttagcataaagataattgtcatggtcactaaagtcgatttcttggattgcaagctggttagcaacgactgcataggcatcatccgggattcgttgtgcgacccagtaatgaccagcaccagtttccatgtaccaaacttcgttgacatcactaaagagaatcccgttagtttcgtaggtgccgtgttcttcaataatatgcccgagacgttcaacgccttcacgagcagaatgaatgtacggtaaggtgacagtgaccattgcttcttcaccgatgccgtccttaacatacgggtcagcagccagtacgcgtgtattacagtaagcactttcagtagcactcattgccacgccgtactcgttaatgccatcctcctcgaacaggccatattcggcagtccattcaggggtggctgtgtatttcgcacgaatctttggcagggtcatggtaaagggatgagtttgattctgagacttgaaggtctgtggttcttcgaattcgcggtgcgcgtggataatcatttttttcgcccaagcggcgcgtgaatcttcattacggccaatcatggtcgaaccatccgcgctggcatttttacccactaggatactagtgcaggcggaataaggattaaactgatgagtcaacatatggggccttctttctccacggtacgagcagtcaatggcggtatcgtggcataatcatttttgttaaattaattttagcatgtttagtcatcaatgggggttttcggtttgtgcttctgattagttttgcaaggtagccttaattggtcagcgtgctgggcattagaaaagaaccgttaaatcaacaacgtcgtggcttgcaaaatagaaaagattaaagtaagattaaaacattcgaaaatagtgaattaagataggagcgtggcctcatgccaatcgtacacattgatctaattgctggtcgttcacaagaacaacttaaaaacttggtgaaagatgttactgacgtggtcagcaagaataccggtgcaccagcagaacacattcacgtgattttaagtgagatgcagaaaaatcgctatagtgttggtggtgtcttaaagagcgacgaagaagcagaataggttgttcattgccggaccggtcgaatatgacgtggccggctttttttaaaagtttagaaggtaggttaaactgtgaacgaacaaattaagacggatgcattaaattcggcgcaccatttaatggtcgggggcgtcgatacattgacccttgcaaaaaaatatcaaacaccgctgtatgtctatgataccggtgcaattcgtgccgaaatcgcagcattcaagcaagtttttgaagaaaaccacgtggactatcaaatcagttatgctagtaaggcgtttgcaacggtcgcgatgtatcaattgatcgcccaagaacacattcattgtgatgtggtttctggtggtgaattgtataccgcccaacaagcagatttcccaatggccgccgtctcgtttcacggtaataacaagtcactggccgagctaaccatggccttagatgccggtgttggtaccatcgtggtcgataatttcggtgaactacgacaactgacgacgttgacgacgcaacggcaacagccgaccacgattatgttgcggattgccccagggatctcagcgcatacgcatgattacatttcaactggtcaggccgattctaagtttggatttgatttggacagtgggcaagcagaccaggctatcaaagccacgcaagccgcaccatatttgaaactggttgggattcattgtcacattgggtcacagatttttgaagtgaatggttttgagatgattgttgataagctcgttagtgagtttgctcgctggcaacgcgaacttgatttttacccacagatcatgaatgtggggggtggttttggcgtgaagtacactgccgaagatcatccgctgcagccaaccgattttgtcgatgcaattattaaggaaacgcgcgcgcaaactgcagcccaacaagttccaatgttagaaatctggatcgagcctggacgctcgttagtcgctaccgctgggatgaccctgtatacgattggcgatgagaaggatattccgggcattcggaagtatttgtctgttgacggaggtatgggtgataatattcggccagctttatatcaggccaagtatgaagcggtattagccaagaatccggccttaccagctgaacaggtagcctcgattgctggtaaatactgtgagtcaggtgatatgttgatctggaatcagcaattaccggccactgcaccaggcgacgtgttagcggtcctagataccggtgcatacggttattcgatggctagcaactacaatcggaatccacgacctgccgttgttttttgtgaacagggacatagtcaacttgttgtgcagcgtgaaagctatgctgacttaacacggctggacctcccactctcagtgccggagaaaaccaagtagattagtcacccaaaagcatttcaagagttaggctcttgaaatgcttttttaggtctgctgctgtcgtcgaagggcttgtggcaacgtttgactaggatcagtgctaaaatgggcagtatgaatttattagttacggtatacttatcattgaaggatgttaatggctgctatgaagtcattacgctggtctgaagatggctagcaggggtgccagcatgtggcgtgggatttccaagtgaccggttgcatactggccctaatttttttgttaaatctatccgctttgcttgcgttaggcgtgaagtttgttaaaatttgatagttaaagtcttcgacggtgacgatggtcaataaggtcccaatagataattaacgatttaaataaccggtgggggagttgttaaaatgtttaaaaaatggctaacttggccagtattctatgagctgacagaaatttatacggcaccacttaatatcatgtggtttgttctcggaagcgccattgcgcagtatcacttaggtacggtgaattggcttaacgtgacgctgtgtttagttagcgtatttatttttgatttagccgtcaatgtttctgataattattatgattatcggcatgctcgtgatcgggaaggctatgcgcagaagacgaatccgattggtcgcttgcagttacccgtagcgggtgtcggccgcttagcattgggattgtacctgatttcattgattcccggaatctggcttgtcatgcggactgggtggttagtgctcgtccttggattagttggctatgtgattggtattttttacacagctgggccctatccaatcaacgcgaccccgctgtgtgagacggtcgtggcgttagcaattgcatttttaattgaattgacctgtgtggtcgtatcgacgtatggacagcatccgttgacttggtcgatcgttggaacgactttcttactatgtttaccactgaccctgattttcttttgcctacaactggctaataacacagcggaccgtgatgaagatattttgaatcatcgctacaccttggcctactaccttggtaaaccaggttcggtacggctgattcaagcgtttttagttattggtggcatttggccgctcgtgaacgtcttactgggactagcacccattgttacgatttgggtcgtactcttactaccaattatgtggcaaggtatgcgcccgttctttgaggtgcaagataaaaagaagacgtttattacgacggtcaagagtgcctcgctgttcttcattctatacccagtgctatttgttttagggacttggttgtaacgaattagtaaagctcacttaatttttcgcacttatcgtggttatttttatgaaagtggactatattattaccagtttataaaataggggtaagcaggatggaaacagaacagcgacagcaacgaagaattgcggtgtatcacttaattgtcacacttttgacactctggtcagcagttaacgtgatcctattatcgtttcatatcggtgattggcacgttgaaacccgcatcagtaacggcttattagtcatgtttgcggtggactactttgtgcgcctaattcgttctcgagatcggaagacttttctcattcattcagcgttcgatttgatggggattattcccatgcacccggtgtttgcactctttcgacttgggcgtttggcacggatggtccaatatcaccatttgttctggaagctcggactggatggtaagtggacgcacgattttcaccgctttatctatagcaccgggtttatctacctgttttcaattagtattgcgattattgttcttagtgcgttgctcttttccgttttcgagcatcaaagcctgtcagattcactgtggtgggccatcacaacggcgactaccgtgggttatggtgacgatacgccccatactgccgttggcaaagtgatcgcggtcgggctgatgttcggtgggattggttttattggtttgttaacgagtacgattactgacttcttcacaacgcaagccagtcagaatgtcacgatcgaggaaccacagcatgatgacgagctgcgacaactactgattaaaattgacacgttgacgacgaaggtcgatcatttacaaaatcaagttaaacgtttagaaaaatcaggctacaaaaaacaacattgaattttcggaccgttggatgcccttaatggggcgcagcggtccgttttgctatgctataataacggtaacaaattcgaaacggtggtggtgagatgggacaagcaataacacggtgggtctggctaccagccccaattgtgacccgtcaatcaacgtttaaaattcatgtgggggatttacagcggcatccagtgccattacgtgccgcacagtggtatcaatttgagcagtcacgaacaaagctaatctgctcggtgccaatcacaacgactcagtatgcggccgttacgcacttagcagctcagcggcttaaagctggtcaagcgggaatgttaccagcacccgagcagcccgtgatgacccgggggacgacgattacattcacaatgtaaagcggcgtgatgacagttacttactgtaaagatactttgtgaatggtacttgacggttggggggcacgatgctcacgtgttatattcaggctaatcaaattgccgcgaggtcgcgaattcacgaggaagtgatttttcgatgaaaacacgctatcagttacaagtcaagtacgacggaatcagatcgttaacacgttgccgcgtgttggcaatcatcattgcgagttttacgggttggctgaccgggtgcgagttagcgcaggccgccacggtgccgactatgatgcaaacttaccatccttggtccgtacgggggctgaatctagaaagcttgcgtttgctggtggcaacgaccgtcttagggctagtctgttggggcctagccgcttacttaaaacctaaggccagtgagactgagtaaacaaacgattgttgtctgacccttgatagggggcggatgataatctttttttcgtaccacttatgtggcactgagcggtgtcgttcaatgtgggagcgcgtatccattcccaacgtgcactagcacgccacggacctcgcgcgcagcaggtgagctgaggaaaatgatggcgaccagcaaggcaagtttggtggtcgcgttcacaatttaaaatgatcccagcttgttgattcgctgttagcaattggttgaatgaaccggtgatttttttaatttacatcttattaattaaaaaattgattagcgctaaagctagggatatgctggtaaagacgggtagttgtaaacaaaaatatgggcgcaaggacttgcatagaaattaaaatatgattaaaataagtcttattaaattaatggaggcttgcgaatgattagtcaaaaccatcgtttggatcagcaacttattgaacgtgaagaccattatatggcgacggcggcacgaatcaattactatgatttagttattgaccatgctcacggggccctgcttaccgatgttgatggcaaccaatacatcgatttgttagccagtgcttcggccattaacgtgggccatacgcaccctcgcgttgttaaggccattcaggaacaggcagccaagttgattcattacacgccagcatattttcatcatcaaccggaacaacgattggctgagcgactggcaaaatcagctcccggcactgataatgaggtggtttttggtaactctggttcggatgccaatgatgccattattaaatttgcacgggcctatactaaccgacaatacatagtcgcctatacggatgcctatcatggttcaacgtatggctcaatgtcactctcaggagttagcctgaatatggtccgtaagatgggaccgttgctacctgggatcgtgcacgtcccgtatcctgattgttatcgtacgttgccgcatgagacggaacatgaacttgcattacgctattttgaagcgttcaaggcaccatttgactcatacttaccagcggaggaaaccgcgtgcgtcattattgaaccgattcaaggtgatggcggtatccgcaaggcaccagcagagtatgtccaattagtctatgacttttgtcaccagcacggtatcttatttgccgtcgacgaggtcaatcaagggatgggacgaaccgggaagatgtggagcattcaaaacttcccgggaatccgaccggacttaatgtccgttggcaaatcactggcttcgggattaccacttagtgcagtgatcggtcgccgtgaagtgatggagagtctagcagcgccggcgcacacctttacgacggcggccaatccggtttgttgtgcggcggcgctggcgacaatcgacgttctagcagatgaacagttggttgcccgttccgccaattatggccgctatgccaaggaacagtttttagcgcttcaacaacgccatcctaaaattgggcaggtacggatgtacgggctgaacgggggcattgaattggtgacagaccggcagagtcagcaacctgatcctgattttgccagtgacgtcatttatgccgcttttgaacggggtgtcgtcatgataacgctcaaaggaaatattttgcggttccaaccaccactagtcatcacgaagacgcaattagatactgcgttaaccgtattagatgaggcaatggctgctgctgaacagggtctggttaaacggccccgaggcaagattggttggtaaaataaggaggattttgatgcaacggttattaaaacggttaactttaaaggaagatccaagcatatatgaagacaaagattctcacctagctcgagtattgacggtcaaggacttcttggctttaggggtggggacgattgtttcaacgtcaatttttacattacccggagtggtggctgcgaaccatgcgggccctgcggtagtcttctcattcatcgtcgcagccatcgttgccggcctggttgcatttgcttatgctgaaatggcggcggcgatgccgtttgccggttccgcttattcgtggatcaacgtaatgttcggtgaattctttggttggatcgctggttgggcgttgcttgcggagtactttattgcgttggcattcgtcggttcaggactgtccgccaatctgcgggggctcttgtcaccattaggactaactctaccgaaggctttgtcaaatacgtttgggactgatggtggcgtggtcgacctgattgccgtcttggtgattgcgctggtttcgttactgctctcacgtggaatcagtaaggcctcccgggtcgaaaacgtgttagtggtgttgaaagtgttagccgtactcacgtttatcgtcgtgggtgcgacggcgatccacgtgcaaaactacgtcccgtttatccccaagtaccatttaaacgctgatggtagtgcttttgggggctggcaaggaatttatgccggggtatcgatgattttcttagcttatattgggtttgattcgattgccgctaattcagcagaagctaagaatcctggcaaaacaatgccacgaggaattcttggttcactcgtcattgcggtggtgctctttgtggctgttgctttggtcttagtcggtatgttcaaatattcatcatatgctaataacgccgaaccagtcggctgggcattacgacaagctggccatccgattgttgccagtgttattcaggccattgccgtgctgggaatgtttactgcgctgattgggatgactttagcagggtcacggctaatttattcctttgggcgtgatggtatgttacctaagtggcttggcaagttacatcataatcaacctaataacgcgctacttgtgttaacaatcgttgctattatcattggggcgttttgcccgtttgcttttctggcccaattgatttcagcgggaaccctgattgccttcatgtttgtctcgctgggaatctatgctttgcggcgtcgtgaaggtgttgatattgcggtaccagcctttaagatgccgttctatccagttttaccagctattgcctttctaggcgcactgttcgtttttatgggcttagatatccaggcaaaattatacgcgggcgtgtggttcatcgtcggcttagtgatctactttagctatggtatgcgtcactcatatttggctgaaaaacgtctgtctaagactgatactgcggctaaatcagcttcgaaggtggctgattcgaccgttgaagagcgtgactgaacttagctaacgcaagcccttgatagttgaacaacaactaaaatggcacttccagaattgaattttatctggaagtgccatttttgagtggtgattacgagctagtgtaaagtccgaaaattaatagtgatgcgcagtcagcaacttaagatacaactgacgactacttgcatccgaacttattccgcaattgcaaaataatcgttcaagtaacgagcaacaccgttttgatcattattataggccgttacatcgtcagccgttgctttgatcttgtcagtaccattggccattgccacaccgagacccgcgtatgctaacatctcgaggtcgttatgttcgtcaccaaaggcgatgatattgcgccgtgaaatttgaaagtaatccgctaagtaggcgacacccttggctttgtggacgcctttggaggtaatctcgaggatggcattcgggccgccccaaacaccaacgtcaacttgatcgccaaagcgttcagtgatccagtcaatgatggcagcccgccgatcaagctggactagcaagacgagggaattcggattacgagtcaacgtatctggtgtaagtcgggggctgtcagcaatctctgggaagaattgaccagcaatcaaatcttgacccgctgtcatggtactgtttttattttctgcaataatttcattgatccccaattgttcgcgatatttaacgagtgctaagacaatcgctttgttgatcgtgaactgatattctgaggcccatgtttggtgaggtaaatggcccagagaaccgttaaagttgatcattgggcttttgagacgcagctggtcatagatcgcttgtgaaccctgatatgagcgaccagtaataatgctaacaatgtgacccgctgcttgtagtcgttgcatcgtttggatcgtcgctgaattgagtttggattcagcattcaaagtggttccgtctaagtctaacgcaattagttttctttccatattcaacaaacatctcccatatttccggcagttaattaatttaatttagcataaatctcacctaattgcgaatctttgctaccttacagtcggggcaaaatgtggtaatctaattgaggatgctttttaattgaggaggaaatttgggtgcaattaccagcagaatttattcaaaaatatcaacgactactaggcgatcaagcgcccgcttttttggcagctttcgatggccctgttgaaaaagggtttcggattaatccgaacaagactgtgacggccacgatgcgcgccaagatgacagcacccgttccgtatagcccaattgggtattatggcaaggtgaacggcaatgcgctggaacacttggctggtgccgtctacagtcaagaaccaagtgccatgaccgttggcgagtttgcaaaaccagaacctggtgaacgagtgttagacttatgtgcggcaccgggtggcaaaacgacgcatctgttaagctacttgcatcagaccggtctactcgtgacaaatgagatcaatcggcaacgggtgaccgcccttggcgataatgtggaacgctacggcgcccgcaatacagtgattaccaacgatacacccgccgcccttgccaaggaattgccaggcttttttgaccggatcttggtggatgcgccgtgttcgggtgaagggatgtttcgtaaggatcatgacgcagttcagtattggacgcccgactatccagcggcgtgtgctgaacgccaacgggagattttgacggaagcggtcaagatgttgcgtccgggtggacatttgatttattcgacctgtacctttgcaccggaagaggacgaacagatgatggcctggctgttaaaaacttatcctgagtttgagctggagccactggccaagacggctgggatggtcgatgcaaagccggaatgggcggatggcaatcctgaactggctaaagcggcccggttatttccgcacttgatgcgcggtgagggtcactttattgccaaattggtctatcatggcacgacggtgggcaaggacaaaaaagtggttcgcgaacagttaaacgccacgcaacggcagctatggacggactttttaaaaaaacaagcaatggccggtttaccacagctcgtgttacaggcacatggtgatcagttatacggcgtgccagcgatgatgcccgttacgcgaaagctcaaggtctttcgccccgggattttattgggaacgtttaagaagaaacggtttgaaccaagttacgcgttagccttagcgagtgatgatttgtccttacccaaaactgaaataacgcgtgaacagtgggcattgtatgtccatggtgagacatttgaattgacaagtgcgcctgtagctggttttcgggtcttaacttgtgatgggttgccagttgggtttggaaaaatcgtcgccaagacggttaaaaatttctttcctaagggcttacggttcttggcgacctctgaaaacgcgacgctctaacctgacatgatattgactaagtcataacgtccgcgtgcgattgacgctgaacaggtgatgagcagcggccgtcatgaatcattcgatccgtggtaaaatcgggggaacgatctacgcaagttgatggtcaaatggacccaatcaatcgtaatattggaggaagagtttatgtattgcccaaattgtgggaaaaagaatgatattgacgcgttattttgtgaaaattgtggtgcgcggctgattatcccagccagttcagcgcaaccaacaccggcgtcagctgtaagttctgctgctcaatccacgtcgtcaacggctgcttcagaagcaccgagcgccagtacatcgatttcggctgcaccgactgcacctgaacctggcacccgttcagcgcaacatgcgcgtcaaaatgcgcaaccacgttcaacgtcaaaactgtcttgggttattttgatcgtggtattagccgtggcacttggtggtggctattactggctggaacatcagcgtcagagtaattcgacggcaacaacgacggccaaatcttcgtcgcgcactgctacatcggaaaaagccgagtcgtcatcatcgtccaaggcatctgctagtacggcaactcagacggcattgtggtcgacaaccaagtcgagcgagttagcctcgtttatgtcgtcatggcaagataccatgaaccaatcgtacgaggggacttatgatggtcagtcggtaactattggtgagttgaatttaccttcagacatcaaaaacaatcagtaccaagataagattacggtcaatggtgacacagtcaagctcaagtggacgacggctgctgataccgatgcgaagtaccaggtcgttgccgcggccactgatccgaacgcgtctagtggcgtgattacgtatctgtatgttttccataatggttcgccagacgttctggtctcgcaagacagtgccactgccacaacgtttaacttcactagttcacaaaatacggatttacaagatggctttgcaaagattgccaatgcggattaataactgaattattcgaaatcgtgtgtttatgctaagtcggcctgaacacacgatttttttgcgccaatattcgaccagaaaatggcgtattggcgctttaaaactgaataattagtgtcgggtaatggaaagcgatactgatttacaatcgattattgaaaattattatttatttacaaaatgatatccgtcggctgaagcggtttattagtgcaacggcacgcaacgtttcagcgactgcatctatttgtttatgcaacagcatgcaatataatgacttttttatgaattatatgtgaactttatatgaatcaatgtatccgctaatactatctgagcccttgatgttagccgatttcatgccaaataggaacggatgtcaataagtaaaacgccttcatgcaatttcacgcaaacgcttgcataattttgaaagcggttttataatctaacttgtactcaagcgattgatattatttttgggaggctttattgtgaaagaaacatctaaaacaacggccggattaccgaaactgtcatccaataagatttggatgatgagtctaggttttctcggtgttcaaatggcatttacacttcagagctcacagatgagccggatcttccaaactttaggcgcggatccaaataaccttggctggtttttcatcttgccaccccttgctggtttgatcgttcaaccgatcattgggagtttatccgaccgaacatgggccccacgtttaggcgggcgacggttaccttacttgattctgggaacagtcgttgcggcaatcgtgatgttactactacccaattctggctcgtttggatttggttacgcttccatggcggccttagtttttggtgcgattaccgtggcatttcttgatttatcgtctaacgtcgcaatgcaaccattcaagatgatggtcggggatatggtcaacgatgaccaaaagagttacgcctatgggattcaaagcttcttgttgaatactggtgccgtcattgcggcaatcttcccattcctgttgaccttgttcggggtcgccaatacggctagtaaaggtgttattcccaattcagtgatctggtcattttatattggagcagcaatcttagtggtttcaacgattatcacgattgcccgggtgcgggaatatgatcccgtaacttacgcgaagtatcacggcattgatgaaagcgctaataaatctggtggtaactggttggcactcttgaagaaagcaccaaaggttttctggttagtagccttagttcaattcttctgctggatggcatttcaatacttatggacatactcaaccggtgcaatggctgccaacgtttggcacaccactaatgccagttctgcaggctaccaagccgctggtaactggtacgggatcttatctgctgttcagtccgttgccgcggttgtttggtcatatgttttagccaaggttccgaataatcggcataaacttggttatgctttgagtttattacttggtgcaattggcttcttctcaattttcttcattcacagtcaatcagcacttgtcgtctcatttattctggttgggatggcctgggccgcaatgaatacgtatccattgacgatggtaaccaacgccttatctggcgaacacatggggacttacttgggtctctttaacggctcaatctgcctgccacaaattgttgcgtccttattgagctttgcattatatccattatttggcaattcacaagccaacatgttcatctttgctgggatcgtccttgcagtaggtgcgggcacagttggtttgatcaaagaaacgtacaaaaactaggaggaattaacttatgaaacgaatttttgatgttaatccatggcatgtcttgacgactgatttcaaaccagaaaacaaacggctgcaagaatcaatgactagtctaggaaatggttacatgggcatgcgcggcttctttgaagaagattatactggggatacgcttcccggtatttatcttggcggtgtctggtatccagacaagacccgggttggctggtggaagaatggctatccagaatactttggcaaggttatcaacgccgtcaatttcatcaaaatcaatttcaaactcaatgggactaagatcgacttggcaactgccaacttcagcgattttaaacttgatttggatatgcaacacgggactttgacacgatcatttatcgttgatcaagatggtcaacgggttcgcgtgacctttgagcgtttcttgagtgttgcgcaaaaagaactttctgttcagaaggtgacgtttgaaaacttgagcgatcaagcggtggaattaaaagttgcttccgcactggatgctgacgttaagaacgaagatgcgaactacgatgaacatttctggaacgtccacgaagttacggatgatcggttaattgctcagacggtaccaaatgattttgggaccccacagtttacctctgggatgcaagttagttatgtaacgagtttaacccataaagcggccgaagtgactgatacagccacggttgatcgctacttcggtacgttagaagctggggccagcgttagttttgaaaagcgggtcgtcgtggttacgtcgcgggattatccgactgatgatgccattatgactgcacttcaacgtctgacagatacggtcagcgcccaatctttcgatgatttattggcggcccatgaagcgggctgggccgatcggtggcaacaatcagatattcaaattgaaggcgataccgaggcccaacaaggcatgcgtttcaatttgtttgaactctttagtacttattatggtgatgatccacggttgaatattggaccaaagggctttactggtgaaaagtatggtggtgcgacttattgggatacggaagcatttgccgttccagtttacctggggattaccaaaccagaagttacccgcaacttactgatgtatcgttataagcagttggatggtgcctatcataatgctcgtcaacaagggcttgatggggcattgttcccaatggtgaccttcaatgggattgaatgccacaacgagtgggaaatcactttcgaggaaatccatcgtaacggcgacattgcctttgctatttataactacacgcgttataccggtgatacatcatacgtcttacatgaaggcagtaaagtgttgacggagatttctcgtttctgggcagaccgggtgcacttcagcaaacgtaatcagcagtacatgattcatggggtcactggcccagatgaatatgaaaacaacgttgataataactttaataccaattatttggcgcaatggacgttgaagtacacgcttgaaattttagatcaggttagtgacgaccaagcagcggccttaaacgtgactgctgaagaacgtgcccactggcaagatatcgttgatcggatgtatttaccatatgacaaggatctggatatctttgttcaacatgatggttatctggataaggatttagcgcccgtttccgcaattccagctgaccagttaccaattaatcagcattggtcatgggaccacatcttacggtcaccttatatcaagcaaggtgatgtgttacaagtgatgtatgactttattgatgatttctcaaagacacaattgaaacacaattttgatttctacgaaccgatgacggttcacgaatcaagcttgtcaccagccatccatgccgtgttagctgctgacttacactatgaagacaaggctgtggctttctataaccggacggcacggcttgatcttgacaattacaataatgatacggtcgacggtcttcacatcacctcaatgactggtggttggattgcgatggtccaaggatttgctggcatgcgtgttcatgatggacaactgagttaccggccgttcttaccaaaacaatggacgaagtattctttccgtcaggtcttccgtgatcggattattgaagtcacggttgatcacgatgggacgactttgaagttgattgctggggaaccgattgatgttcaagtggatggtaccacgcaaacattgacacagaactagttcaatccgcactgatcgaagggaatgaggcgtacgatttctgcagtaccatttggtgtgtatcaaggcgagtcagtctatttatacacgattgaaaatatccatcatagcaaactaaaagtgttgagttatgcggcaacgtggtatgacttcgaagtgcaggtcgaccgccagccacactcattagtgcttcactttgataacttggcggattatatcgagacgccttatcaagtcggcaaaacagtgggtcgagttgctggccgaatcggtaacgcgacgttttccttgaatgggcagacgtatcacttacaaccaaataacggccggcatttgctacacggtggcaatcatggcttacaaacgcataattttcgagctcgttttgatcctgatggcgacactgtcacattgacgacaacgctagcgagcgctgacgatggttttccaggcgacttgacggtaactgtaagctatacgttaacggccgatgatgaggttcaaatcagctatcacggggtgaccactgctgatacgttattcaatccgacctgtcacgtttactttaatcttgatggtcaggccgcactgattaatccccagcaattacgtatcaactcgaccaagctagttcatacgaatcacgagaaggttccgaccggcgtcttctacgtcctgtcaccagcgtatgactttcgtgagcagccaacgattcaatcgcagctcgatcgattgatccaagaaactggcaggacggaatacgatgattgctatgtgcttgaccaccaggatgaacccgctggcgtgttggcaacgactcacgggcgactgctcatcaacacggatcgcaatggtttagttgtctttaccgctaatcccgaacgaacgcagtcgtatcgtttaggggactaccatgcgctggccgtggaattgcaaaccttgccggatgctattaatcatcatggctttggcgatgttgttctacgggctggtcagccacggacgtacgtgaaccgctaccaatacgtgtcaaaatagcaatcaatagatgatggaaattattttctttaccacgatcaaaaagcagtgcttgccataggggcacactgcttttttggtgtacttggttataacaaaaacgcgtcatcacaagtatagaatgacattccgtagtttgtgatgacacgctttgttttaatctttaatcgattgcttgtagttaacaagttcaggtgataacagaatcttgtcctgaatacggctacttttgaattgatcaacacgcgttacgccgacgagtgcaaataggcgttttaattgcgactgccaatccgtcagcatcgcaatgacttcgtcgtccgtatgatggagtaaagcgtgtagcacggtgccagccatgccgaccgcgtcagcgcctaacatcaacgcttttaagatgtcgagtggctgtcgaacgccaccagcagctaagaccgtgagatcatccggtcggttctgaacgcctagcaaggactcaaccgtggtgaggccaaagtcgtgaaggtaggccatatcgcggttagcacgtcggcgattctcaatgtcgacaaagttagtcccaccgtgaccgcctaaatctaggtagcgtacgccggcagcgtagagctgttgcatcgtggggcgggaaataccaaagcccacttctttgacgatcactggtaccgttaaggcttggactaagtccgaaatgttagttagccaatgaaagtcacgatcgccttctggcatgacgatttcttgaacgacattgagatggagctcgagcgcatcggcctggagcattgcaatcgctgtttgggccgcagataacgggtggccggcaccaagattgccaaagatcagcccgttcggattgtggtcacgcatcgtggcaaaagtgggggctacttggggatctttgatggcgacactttgagagccggtcgcaatcggtaagccacaagctgcagcgatgcggcctaaacgagcgttgatttcgcccgttcgctgtgagcccccagtcatcgcttcaatgtagagggggctgtcccaatgccactggccaacggtggtggctaaatcgacgtcggccacggcagtttccggcaacgcgtcgtggcgaatccggacctggtcaaaggcattggcttgttcgccatgaaaatacttttcagctaacgaaacatgttcatctttccgatgagattgttgactttgtggcacggtgccacctccaattaatttagaatctgaaaacgagtccggcaaggctgccaggctcgtcaataaactgcttaagaatttggtaaaacggtatcctgaaccgtatgcacgtttaagttaagttgttcgataccatcgtgagcccacgcagttaataatggtcgtgggtcgatggtttgatcaatcaaaacgatcccacagtcaccaccaccagcgcccgaagtctttgcggccgcgccagcactttcggcgagttgaatcatacgctgcagcaggggtgtttcaatcgtcacgtgactgaaatcgcccaatttctgaagtagttgacgattcgttcgcaactcggtttgaatcacgtgcaagtcactgtgatgaaaaccagtgatcatacgttttagacaagctttgctggcttttagaaaggtctggtattcgctgcgttgcttcgccttgactaaagccactttatcgactaagtgtgatgtggaggccggtgaacccgtccaaccaatcatcaaacgtaaggctgctggaggggtcagtaactcgatttttaggtcgggccacggcattgtcaacaaatcacttaagcttgactgagcttgttgtaggtgtaaccattgccgatcgaatgaatggtaggcgatccagccaccatagacgctggcagcaatgtcaccaagcgaaccattgccttgcacggatagatgggcaatcgcggctaatttgaacagtttatttttatccatcggtaaatggtaaaactgacatagtgctttgacggttgccacggtcactgctgctgaagagccgagaccgtattttttaccatcagcactatcgagttcgctattgataccgagatgataaacaccaagttcacgccctaattcatgggcataactttcagtgagattgatcgctgctaaaatataatggaagggattgtcacgattatcaaaaaccatcgcgtctccctgacgtcgccagacgattgagttttcttgatactgctcagaaacgatgctcccaatcgtttcgctaggtgaaatcgttgccgttacaaattgatctagtgcaacaataattgctggataaccactttccactacggcgtattcaccggcaatgtagagttttccaggggctttcaccgttatcatgccatcatatcctttcatgaccatcgctgatcattttaaattaaactgaattatttttccgttatcgtgatacctggacctggtttagcgacgattaattgatcagcgtcaaaatgttgttgtaacccggtcataatggtgtcggtatcttgacccgcacaaatgattttgacgtttgggccagcgtccaaagtataataacagtttatcccgtgtgaacgcaagtcgttgactgcttgaatagccgtcagtgtatccgcggtgaagtagttaaaggcgggttcagcgctcaaattaagcgcgtgcattcgcattgcgttcgtttcagcaatttggccaacagtagtgagatcacgatcggcaatggcttggcgcattcgcttcaagtccgtctcagccgtggtgatccaagctggatagtagggggatgtcgcgacgacccgtgccatgccgtccgttgagctgattggctttttggtggccttcaaaacaacggcgatcatttgaatgtcccaatcgaccgggtcttgtaagacttccgcgtaagaactctgatcatcatggccggcatgccattcgacaaaaccgccaaaaattgagcgggtcgcagaacctgagccacggcgtgctagtcgtgatagatcagccgcatctagttgtaagccagccgcacgactagcagcccctgctaaggccgcgaatccggaggcggaagaggctaagccagctgaggtcggcacatgattttcagttttgaccgttgcatagttggtttgaccactgcgctggcgaataaggtcgaggaactggctgattcgtgctgatttgcccgtgggtaagtgttgatggttaaagtaaatttggtcagtatcgagatgctcatcgaaggtcacactggtctgggtatagaagtgatcaagggtcagcgaaatactcccattttgtggtagcatcagcgccgcatctttttttccccaatatttaactaacgcaatgttagtatgggcctttgccgtaacggttttcactatgtcttttcctccaaaattaaaattagtcatcgcacaaaagtggttcgacccaagtcgcagtcgcaccggctgcggccaatttttgtgataattggttggcgatgctggcttccggagcgagcgcgatcaagcaaccgccctgaccactaccggttaatttggcagcgagtgcaccattttggcgagccactgcgagtagttgttcaagggcaggatgactgacacccatggaacgtaagtcatcttgcgcaccattcagggctgttgccagggcccccatgtcaccatcttcaagcgcggttcgggtctgacgagtcaatcggcccaagtcatcaatgcgtgcttgaatcgtcgcgccctcaaccattagtaagttgcgaacggtcgccactgcaactttggtctgacttttaatacccgtgtccgcgatgactaaatagccgggaagctttaccggaatcggaaagttctcacgacccttgacaaaccagacgggacttttggcactggccgtcgcaacgtctaggccgctgggttgaccatgcgtgtaactttccgccacattggcagtggccaataattcttggtgggagagtggtcggtcgaagaaatcataaaaagcccgcgttacggccacggccgctgcggctgaggaccccattccgcgttcagagggaatatcgctcgtgatgtgaatatcgaagccctgctcgggggcatcaaaacgtgcaagcaaggttctaatgagcgtctgaataccgcctaagttggcagacatcatcttaaagtcgccgttgaagtaacggcttttgaccgtctgcgctgcatcacggcggtgaataatggcctgcatttggatggtcgaaatcggtaaggcaatggcgggttgtccgtaaaccacaccatgctcgccaattaaaataattttggcatgactagtaccggtagctagatctttcaatcgtgtcgctgcctttctgtaagtagattaataatagcttcataataccttattagcacttcttttgccatgctaaccccggcgaacgcgctgaattcagttgaaatgtaagttaaactggtttggaaagtaacaatttaattaaattaaatcattcacgtgaggggcgtatggacagactggttatcaacggcagacgaagatcgattactatgttaaaattagtaaatgattagaaatcagtccgataatgatgaaaaagaagttgagctgcttgtgacggactacgtggcccagaattcactaattaggaaagtaaattttgggtagcagtgccggctattcaagcgcgcgtactcagctgactgtgttatggcagatgtacgccgagacactttcatgaactttatcgttgctcaatcatactcttgaccagtctctgcccgttgtcctcagactgacgaatttggcttaagagttggtcgggctgagttccctacgccgaatatgctataatttacaatgatcgacgtgacgtatgtgtgacgatcggtgtggaggatgagccaagcggcttgcgtcatcaggacgacttgtgtcactggcacagtttagtaggttgaactcagctaagttgggctgaccgacgaaccgttaaagttagtggtcgagaccaagtgtagcgctacttggaccagccttcagtctgattacaaacacatcgcacgtgatatgccataaagatcgattagttggtcgaacatcagcgttagtgttgatgacggattcaagcggtaaccaatctaatgaacatctttacaatccataacttggggaaatgaccatgaaaccaaacacaacttatgcggtagttgatattgaaactactggaactagtgtgaaggacggcgaccggattattcaaatcggttgcgcgtttgttaagaataataaaataattaatacatttgccacggacgttaatccgttaacaacggttccggccgttatcgagaatttaacggggatcagcaatgcacgggtgcgcaaagcaccaccctttgatgatctggctggtacggtatacagcttattacaagggactgtttttgtcgcccacaacgtgaactttgacctgccatttatcaattcagaattgcagcgtgtcggttatccagaactaccaattcaggccgttgacactgtgtctcttagccaaattctgttaccgactgcttcgagttttcggttgcgggacttgagtcacttgcttgcgattgaccataatcatccgcattctgcggatagtgatgcaattgctacggcccacttgtttatcacgttacaacagcggctcgcacacttaccattgatcacgttacaacaaatggtgcaattagcaccggagttaccacgtgaaacggctgacttgtttgcatacgcctttcaacagggcaaacaacatccacagcagttaccaactgacttagtgatcaaaaacgggctcgctctgcgtaaacagcgattgccacagcaagccgcgggtcgtaaagcggcacgctatccgttgacaaaagcacaaaagcagcatatctttggtgatcgcttgacttatcggccacaacaggcccggatgatgaaccagatttatcggcactactcaaaacagtctgctgaacaagtaccattgttgattgaagcaccgaccggaacgggtaaaacactcgggtatttgctgccacttgcctacttggcacaggatggtcaacaggtggtcgttagcacggcgacgacggtcttacagacgcagttacgtgatcagggcgtggcgttgttgaatcagttgttgcctaatcctgtgacggcggttgtgattaagggtaatcagcattacgttgatttaaaccggtttgcccgtggcttggcgttgcatgaacattcgaagcaaacgcaattattgaagttgcgcgtgctagtgtggttgacgatgacaacgactggtgatctggatgaattgcacttgagcacgtatcaagcgccatactttagcgaaatcgcccatcatggcgtggcctcgttgaaagctgatgacccgttttttaaagaagatttcttacgctttcgggatcaattgaccgcgcaagcgacttttatcattaccaatcatgcctacctgatgcgccacgtggcccaactgggtagccgtcaagagcggccactgctggttcttgatgaggcccagcatctggcagatggcgtcgttcgtgactcacggcagacgtttgatttcaatggctacatggcgacctgccacagcttgatcagtcgcattgacacggaacatagtctaaatttacgggcactgttcgcggaacaaccacaggccgattatcgtctgaaattattagataattcattgaatgatactgacctacacctgcaacaactgcaggcggcgctagccagaacgtttgtaccagcacaaaagggcggcaatcagcctgctgaattaggaatcaccacggatcagttgactgatttctttgcggcccacaatccgctgatcaaacaattacaaacggccattgaaaactgttttttacagtttcaacaattaaatgagcagtatcaacatgatcaatcgcaaatcttgcctagtgaacaacacgtcctcgacgactttgacaatcgtcttcaacatcttcgtcagggctatgagttattacaaacgtggttagtgccagcttcgcgggaacaacgggtcttctgggtgagccttaatcaatggcatgatcgcggcagtctcacgctcgcgggtagcttgatcgatacgcaagggtattttaagacgcaactatatccttacttcagtgcgccactattaactggtgccacgctatttgccactgggaaatctcagtacgtttattcgcaattggatattgaccaagcaacggctaagcatcaccgattatcaacaccgtttgatttagaacaccaggcacggctattcgtcgctacggatgctactgcggcggaagcacccagtggcaagcagcgcgtggcatacttgacgcatgcgattcacgacatcgtgatggcagcgcctaagcaaacgttggtcttgttcaattcactgaatatgattgaagcagtcttttacagtttgcatcaaacggatctacctggtgatcgcgaaattttggctcaaggcgtcaatggtagtcgtgaaaagctgcttcggcgctttatgcagggggacgatgccattctcctgggtgccggtagtttctgggaggggatcgacttgccacaagaacagttggaattgttgatcgtcacgcaattaccgtttgaatcgcccgaccagacgacaaccaaggcccgttatcaacaactaaggcaagcacaactcaatccgttctataacgaagcgttaccgaaagcggcattgaagttacgtcagggaatcggccggttgattcggacggatgaagaccgaggggcagcggtgattctcgatgaccgtttgatgacgaaacgatacgggcagacgattcttaaagctttaccgaaaacgttgccgcccgcaaccggttcattgacgatgattacgcaggaacttcaaagttttttcaaaactaagtaagaaaccattccgcaatcagttaaatttgctataattaatttatctgtttttgaaaggaagagcatatgcgagttcaacgtagaaggcgccctgagcgactcattatgattattctggtcgtcattttagctattatcgtggcggtctatggcacgttatgggccgcacaacggccaatgcaccaagcccagaagacggcgtatagtctggccgtcagcaagggcaagctaaagaccacgacggccttttcacagtacaatggcaccagtagttattacgtcgttacgggaacgtcgagtaaaaatgttccggtatacgcgttaattaacgcgaataaacatcataaaacgaccgttatcaaacagtccgctgggatttcacgtacgaaagccttgaaaaaggtctggtctaaacgcaatcctagcaaggttatcaaagcgacgcttgggaagtatgatgggacggtcgtgtgggaaattacgtacttgaaccagaaaaagaatttatgttatgaaattttgcagtattctaatggaaaccagctgaaatcaattattaacatttaaggttaaaggagtgcggatgtacatggaattatcgcgtaaagtaatgcaggttcaaccgtcagcgacattgaagatcagtgcgactgccaagcaaatgatggcggacggcgttgacgttatcaatttaggaatcggtgaaccggattttcagaccccggataacattaagcaagcagccattgatagtattcaaaatggtcaagcgagtttctacacaccggcaactggattaccagctttaaaacaagccatcagtcagcgaattgaggctgaccatcactaccattttgatcctaatcagattgtcgtaacggatggcgcaaaaatggcgttgtttacgttattccaagttattctgaatcccgacgatgaagtgttattaccagtcccatactgggtcagctattcggagcaagttaaattagctggtggtgtgccagtcgaagttagcaccgatgaacagttgcggtttaccactgctgatttggaagcgcagcggacgcctaagacgaaggccttagtcttgaattcgccacagaatccatccggtctggttttcagccgtgcagaattgacggcgatcgtgaattgggccgttgaacacgacgttttggtaattgcggatgaaatttatgaaaagttattatataacggtaatgaatttacatccgtgttagaattagatgatgctaatatggatcacgtggttttgatcaatggggtttcaaaagcctattccatgactggttggcgtatcggatatgctgccgggccacaaaccatcatggctaagatgggggtcgtgttaggtcacgctgctagcaacccagccgccgtatcacaatatgctgcgattgaagcttttagtggtgaccaatcatctgttgaaacgatgcgtcagggctttgaagcgcggttaaacgaactatacccactgatcgagcgtttacctgggtttaagatgcctgctggcaaaccagcgggagccttttacttgttcccagatattacggaagcattgcgtttaacaggctatgcagatgcaccggcctttgtgacggcagtgttattagaagcccatgtcggtttagtgcctggagaggcgtttggcatgcccggttgtttacggttaagctatgcaactgatatcgattccttgcgagaggcccatcgacggttacaaaaatttatgacagaaaaaattgctgaacaagcaaagtaattggaggatgtaagtaaatggtgcaacagatcaacattatcgatgctaaggaccatgtcgacgaaaaagtaaagattggggcttggctcactaataaacgttcaagtggtaagattgccttcctacaattacgtgatggctccgcctttttccaaggtgtcgttgttaagagccaagttagcgaagaagtttttgaactcgctaaggaagttaagcaagaagccagtatgtggattacgggtgtgattcatgaagacagtcgttcaaagttcggttatgaaatcgaagttgaagacattgtagtcgttggtgaaagtgaagaatacccaattacgcctaaggaacatggggtggacttcttactagatcaccggcatctatggttacgttctaagcggccatgggcaatcatgaacattcgtaatgaagtcattcgcggaacgtatgaattttttaatcaagaaggtttcattaagatggactcaccaattttgactgggagtgcacctgaagggacaactgaattgttccatactgaatattttgatcgggatgcctacttatcacagagtggtcagttatacgccgaagccggagctttggcctacggaaaggtctttacttttggcccaacattccgggctgaaaagtccaagactcggcggcatttaattgagttctggatgattgaaccagaaatggccttcatgcatcaagaacaaagtttggaagttcaagaacgttatattgcctttcttgttcaaggtgtgattgatcattgtcaatacgcactcgacattttaggtcgtgatgttgaaacgttgaagaagtacaccaagttaccttatccacgaatcagttacgatgaagccattgaattgttaaaagaaaatgactttgacgtggattggggtgttgattttggttcaccagaagaaaccttcttggctgatcacttcgatcaacccgtcttcgttttgaattacccgaaagccatcaagccattttatatgaagccgcatccaacccgggacgacgtggtgatttgtgcggatttattagccccagaaggctatggtgagattattggcgggtcagaacgagcaactgattacaattacttacttgaccagatcaaacaagccggcttaaatccagacgactatgcttggtacttagatttacgtaagtatggtagtgttcctcatgctggttttggtttgggactcgagcgattcttgacttggattacggccgaagatcacgtgcgggagacaattccgttcccacggttgttgaaccggatttacccgtaaactttaattgaaggttagttttattaagagcgtgggacctagtctcacgctcttaatagtgaaaggatgataacgagatggagtccttagctgccgcgttagtgaatgatggtcaaacgaccattgcgaacgcattattggcccactatcgtgaaattggggtcacaaacgatgaattattggtttatttgcagttcaaacggttaattgatcagggtaatcaattcccagatgctgcggtaattgccaagagtttaggtgaatcgacaaatgctgtttttcagcggctacatgaaatgttagccaaaaaattgctgacgattgaatcgatcacggctgatgaccaaaaaattcatgaccgttataattttgacggcctgtatgataagttagcagttgcgctcaaaaagcagccagttagcactcaagcttcggaacaagccacgagtgaaaacagtcggcaaaaggtttttcgggcaattcagacggaatttggccgtgacttatcaccgatcgaaatggaaagtattagtaagtggttcgacgaagaccattatgaaccggaagttatcgaattggcattgcgggaagcagttctgcgtcaagtctataacttgacgtatatggaccgaattctgttgaactggcagaagcgtaacttaaaaacggctgcccaggtggaagcagagcgccaacgcagtattgagcaacgcttgaattccgctccgcaaccacaacgccagacgggcgcaaatgctggtccgaagattccgttattcaaattaggtgaagaccagtcttaaacactgtgctgaaaagcttatcggggaaaactgattttaaataaagtggtggcgattgcctgtgcgaggcgtcgttaccactttttttcgggatgggttagtcgttgtttcatatcaatggcgtttgcccacgtcattggcgcagcgtactgaggttaaaacaggaccaccaggatttcctgtcctggtaagccggtgggatgcacatcattggaccaaaatcagtgggcaccactataaattaaaaaatggttataattaaatgttgacttctcattaaaatagcgcaatactgtaaacaaccaagtaaatatattaataaatacgtctaagatgagtagccgttgttggaatgccttagagaactgccggttggtgcgaggtagccatttcgcaacgttgaagatggtcttataatgcaagtttcaacgctgagctgacggggttaagcgttgacggctacgcccgttatgcggttagagtctcgctaagaattttcagtggcggtacttgaagtgcggtggcctgtgagggtcatttgaagtaaggtggtaacacggaaaaacgtccattcgtccttaatctgataatcagattagagacgatgggcgttttttaatgggaggaagcagactatgacagaggcaatcattgatttaaaagacatcgcagtgacttttgacgacgggcaccaagtcgttcacgcggttcaagatgtcaatctacagatccagacgggtgatatttatggcattattggatattccggcgctggcaaaagtaccttggtacgggtgatcaatttattacagtcaccgacaacgggccaggtagtcgtcaatggccaggccttacaaacgctatcgccagctgcattacgtcaagccaggaaacacgttgggatgatttttcaacacttcaacttgatgcaatcacggaccgtgttgggaaacgttatttatccattattgggtcaaaaaattagtaaacaggaccgacgcgccaaagcattacggctactgaagctcgttgggttaacggactatgcgcagacctacccagataaattatctggtgggcagaaacaacgggtggcaatcgcacgggcactagtcactgacccgcaaatcttgatttctgatgaagcaactagtgcgcttgatccaaagaccacggcggcaattcttgagttgctacaacgggtcaatcgcgagctagggattaccattgtcctcattacgcatgaaatgcaagtcatcaagagtatttgtcatcatgtcgccgttatggctgatgggcggattattgagcggggccccgttgctgaggtttttacagcccccaaagcacctctgaccgttgattttgtggaaacatctaccaatgttcgggccgccattcagcgaatcacgaaaacgattaaattgagtgaattagcagcggaccaagagctgattgcgttcaaattcgttggtcaatcaacaaagcagggaattgtctcgcagttatcgcagacgctgggggtcgacgttaacattttgtttgccaatatcgaccagatcgatggtcaaaatgttggtgacatgattgcgattattacgggggatttaacggccttcaatgcggcggtcactaatatgtcggctcaaggtgtccacactcgcattatcaatgaagaagttgtgaagggaatggtggactaatgacagcattaattccgaatgtcttacaaatgaaagctgaatttattcaagcaacgttagagaccctctatatgaccgcagtttccgcgctggttgcaggaatactggggttgggtttgggggtactgttagtggtgacacagccccatggcattttagctgatggcccctcgtatcaagtgttagacaagctaaccaacttactccgttcggtgccatttattattctgttagccgtaatttcgccgttgaccagctatttaatcggaacaacggtggggaccacggcatcgttagtcccactagtttttggtatttttcctttttatgcccggcaagtgcaaaatgcgttactcgatgttgaccaaggaatcgttgaggctgctcagtccatgggatctagtcccattgcaattatttttcgggtttatttgaaagagggactacctgatttgattcgcgtctcaatcgtgacggtgattagcctgattggtctgacgacgatggctggtgcgatcggcgcgggcggcttgggtgatattgcaatcagtattggttacgctcgctttgaaaacgacgtgacgtttgtcgcaatgatcatcattttgatcttagtctttgctgtacagctgtttggtgattggctcgttaagagcgtcacacatcattaataaagggggaattagccgatgaaacgattagcatggtggttgattggtattgctgcaattgttggtatttgtgtgggattacatgaaataacgagttattcggcccgtacacaacagagtgccacgattacggtcggatcaatgggatcggactatgaagtctggcagcacattgctaaaagccaagatgccaaaaagatgggcttaacgattaaggttaaacaaatcacggatggtgttcagctgaacaaggccacggcggacggtaacgttgatgtgaacgcctttcagtcctggtcatattaccaaacttataatcagcagaatcccaaggccaagttggcggcgttaggaacgacttatttggaaccaatgggaatctactccaaaaaatatcaaagcgttgatgaaattccggatggcgctacgattgcaattgctgacaatccctcacaagcttcgcgaggcttgttactgctccaaaaagcgggcctgatcaaactggcagctaattttggtgtcttaggttcagtgaaggatattacaagcaatccccgtcatctgaaattcaaacagatcgatgatactactggtccccggatcattaaaagtgtcgatgcagttttgatttcgaatacggttgctttggaaggacatttacacgttttacgggattcgattttccacgaaagtctgaataagagtactagggataatgttaatatcttagcaacggccgctaagaacgagcatcgtgctagttatcttaaactagttaaactttaccatcgggcggatattcaaaagtatatcaagcaaaaatattacggtactaagattaacatcaataaaccgctatcttattttgacaattaataagcatattgggtgctggatgattatagataagttatgattatgataataaatgttgtaactcattgaacttatcaggaggtctcaaccatgtataaacgaatcctagtcccattagatggttccgataatgcttattatgcacttgaacatgcgattgccttagcgaaggtttttgactcccagttatttttattgaatgtcatcgatgttaatcgatttggcgtctacagtccagatgtttttacgagtgcggcgccagatatgatgagttttgatcaagcccagagtaagaaactgttggagcgggcccaggatcaagttgcagcccaccagttgcacgccgaaacaattcggcaaactggggtacccaaagtgacaattgcggtcgatgttcccaaggcccaaaatattgatttgatcgtgattggtcgctctggaactaatgcgatttctcgcctgttcttaggttcaacgacagcgtatgttgttcgtaatacggaggctaacgtcaccgttgttaacatgccgagcgatgaagctgaagaggttgaacaaaccggtgatgtttcggccgacgattctaaataacttgtcagagatgattaaagctggtcacacgacgtcaacattgatgctcgtgcggccagcctttttagtttgggacaggcgatgacgaaaaaacaaagtcgtctttcgctactgacgattaccgatttgagtgccaactgatgccgtttgggcgctagtttggttggcgtactggcttggtagctgattgcaggtgattagctgcaatcagtccaatgaatgtcaatgctaccgtcaataccgctagggccataccggcggccgcttcaccttgttcgaacgattgatagataaatgttgaaacggtcgtcataccggaaggcagtaacaatagggcaacgactaattcacgactcgtggcaatgaaagccatcacaaagctgttgagtagcgcgggccatagaatcggaagtgcaatttttaggataatgcggccgaaactaggttcgaagatgcgcgcgctagccagcaattccgagtcaaaggccttgagggcggtcgtcaagtattgcaccgttgttggtagaaataaggtgacatccgcgatcaggaggatggttagggtgccgtataatttggtgaacgccagcacctgtgaaaagagcatcattaagctcaatgctaagacgacgtttggaattgcgagtggcaatgcgcccaaggtatgacataactgtcgcagccacttgggaaaacgttttgttaaactcccaacgctcaagaataaaccaacgatcacattgagactgctaatcagtaatgccaatccgacggtcgtaacaatggcctgccaggcaggactatcaaagcgtaagaggtctatatagtgtacaagtgtcaaattagacggactccaaccaagactgcgttgtttgagtagcgattggagcacgatggcactgaatggcaggacaatagcaatactgatgactagggtgacgaaagtgcctgctaatgttgtcactccaagctgccgatattgtgacgctgaccgttgtccggtgaacttaacagctggccggcgtaacaaccattgctggataccccaggcaatcagggcaatggtcagtaggagggtgccggtgagtaccccgttttggaaatctaagggccactgactgaggtccctttgaatcgtagtcgtcagaacttcgaagtggatgctccgaccaaaggtggctggcgttccaaattcagccaaggttttggtaaagactaaaatccatacagctaagtatgggactaacatgattggtaatgtgattcgcactagtcgttgccaggtgttgaccccatgaacttcggccgcttgaagccagcgctggttgaattgcatgagggctgcgcgtaagcctaagtatgccacgggatacaaatgcagactcatgataatgaccatcccgaacggtgaaaatagccactgaaattggtggtgccaactcggattaagctgagccagtaatccgtgtggttgaaagaaatataaccagcccatcgcgttaatatatggtggtgtcatgaatggcactaacaagagccaatgcaatcaggcgagctttgttaaacgggtgtgcgtcatgatccatgccaaaggggtggctagcagggttgtcccgacgaccgtgcccccactgaggaacagactgtgttgaatgctcacacggttggttggctgcgtcagttgtgaccatagctggcttggcgattgcccgactagtgtttgaccaatcagggcgactaacgggccgataatcagagttgccaacaagcaactggtgatgattgataaggacaagcggatttgatgattactcattggctaaagacctgattgaatgcgacaacgtttttggtcagggccgcgttggcactggtccaattgaccgtgtaggctttgatggcttcgccattgcgtggatcggtcaaagtgctcgtggtacctggaattaagttacttttttgaatctgtctttgaactttagctgataagagatagtcaataaattgtttggcggcggcttgatgacgactagccttcaaaatcatcgccggtcgtggattgaccaaagtcccactcttaggataaacgaaaccaattttttcgccttttttaatagctgttagactcatgtaatcgaccccaccaaagacggcgattttttggccagtgatgactgcatcgagtacttccttgttagcacccccgatatcggcaccgttttcttgaagggctttaagtagttgcgtaccgtgtttcatttgataagcgttaatgaagtccaagctagaaccagaggtttgggggtccggaatggtcacttgattgcgatacggagtggttgtcaagtcagaccagtctgtcggtgccgatttgatgtgccgcgtattgtaggtgatgccgactgccgaagcactgtaattgatcaactggtggctagtatctttaaattgtttattcaggtgtttagcttgagaaggctgataggttaatagctggccattcttttgtaaatcgacgccagcggccattgaagctaaaatcagcacatcagcttggggattgccttgctcggccttgaccttacttaaaattttcccggtcgtgccgtcaaaacttttgactttaatgccagttttggcttcaaaaccgtggatgatttgatcagaaaggggtttaggtccagcagcgtatactgttaagacttgttgactggtttgcgcgttggcggttaacgtttttttctgatgttgattaacataaagcgacgtgccaattgcgagcacgccgagcgtggataatgtgataattgctgctttagacatgtgagtcaactcctaaaaagttagtatttgatgtggatcgatgcttaatgtgatcggtgcagtggtatagggtagctgggtcttgacgtgccaatcataggcgccgacttgaacgcaagtatcaaaatgatcgcccataaaggttgaacgctgcaccaagccttggtaagtgggctgctgagtacccgtttgactgactgcgacatattccgggcgaatggcctggtgcgcgttgatctgattaagggtgcccataaaattggcgacaaattgagattttggctgttggtacagctgtgctggtgtgcccgtttgcaccacgttgcccccttgcagtaatacgaggtggtcggcaacttgcaaggcttctggacggtcgtgagttacaaagatggccgtcagatgctggtcgtgaatcagggcgcgaatttctaattgaagccgtgtgcgcagttcggggtcaagcgcacttaaagcttcgtcgaataaaatcaaatccggttgggtcgctagtgcccgtgcaagggcgacccgttgctgttgcccgcccgaaagttcacgtggataacgatgtcggaagtcaatcagactaacttgttcgagggcccagttgacttgagcagtcaattccggcttggtcagatgcttttctaaagcgaaagcgacattttcttggaccgtcatgtgcggccacagggcaaagtcttgaaaaaccatcgccaagtgccgctgggcagggggctgattccaatgagtcgcggcgtcaaaaatgggctgattatcaaatgaaatttgaccactgtcaggtgtcgtgagacccgcaatcatgtttaagagcgttgatttgccggaaccggacgggccaattaatgccgtgatttgttgatcaggaatcgtcagactgagttgattgattaccggaccttgaaaacttttggataattcgtgtagcttaatggcaaccacgatatgcaactcctttgtcttaattggtttgctcagtttattaagttactttgtattgtagtggtaattcgccgtgttaacgttgattttgagtttagtttatgtaaactttgtgtgttatttcggtaaaacagtgcacataaaaaaagaccactgaatcgaattcagtggtcttgggtgattcttattgtccttcagtcgtgttattggtatcagcggtcggtgtttccgatgaagtcgcttcggaacttgcttcggagcttgaacttgcttccgaactgctgctactttctgaactagattcagaagatgaactttcggcgctacttgaggaagaagcagcttcggaactactactgctactttccgaactacgactacttgcttctgtgctggtgcttgaactacccgttgttgttgaactagagctagctgaactagcggttcctgacgaggcttcactactggagaagaggtgaccaacaacgtaaagttcttcgataccgttcttcttagtcgtgccaactgagcttggtttggtccaatcagagtttggtgaatactgttgaaggtaattcatcatggcgcgataaatttgttgtgaaatcttttcgtttgaggtatctagataaccaccagcttcggtggacttatcatagccagtccaaacggcgaccgaataattcttcgtgtaaccggccatccatgagtcaacgacggcatcggatggtactttgtttttatactgagaagcatagttgtcagtaccagtcttaccagcttggtaaacgccgctgatcttagcggttgtcgccgtcccagtagaactattgatgacccctttcagcatatcagtaatcatgtatgccgttgatttcttcatggcgcgcttaccagtgctagtatacgatgtcgtaacgccatcagaagtagtcactttacggatgtagtatggcttatgataaacaccaccgttggcgaacgcagcgtaggcaccggcaacttgtaaggtggaaacaccagcaccgatcccgttggcatagttaacggttttgaggttcatcccaaggttattggcaaaggttttggctcggcttttaccaacggcttgtaaggcccgaattgctgggatgttccgtgattgaaccagtgcttcacgcatcgtcatattgcccaagtaattattgtcaaagtcatgcacggaaatgttagtcccgggatatttgtatttcgtatcagacaacgacttgtaagttggccaattcaaatattcaatggctggtccataatcgagaatcggtttcatcgtcgaagcgtttgagcgtgatgtccagacagctcggttggttccgtacgtgacattaccggttttccgaccaccaatcatagctgagaccttgccagtgtatgagtcaacaaccgatacccctaattggaaagtctgttttccattattaggatagttgacgtattgagacgtgttggcaatgtcataaagccgtttctgggcatccatgtcaatgttcgtataaactttctcgccatcggttaaattataaccttttttgaggaggtcttgacggacttcgttcaggtaagcatccaagattttatttgtcttttcatgcttcgctaggcttgaacgtcccgaactagttaagcccgtcttgacactgactttttcagcagcagtttcctgactcttggagatgaccttgttatcgtacatcgcttccagcaccagattacggcggctagttgcgtatgatggataagtcgtcgggtcgtagtaggttggtgattgcggcatacctgcgagcagtgcgagttgactaaggctcagatcttttaatgacttaccgtaataatacttggcggcagtccccataccataaatcccgttacccatatagaccttattgatgtaaaattccagaatctgagatttactgtaatgtttttcaagattaagcgcaatccaggcttcctgcgctttgactttcaaatttcgatccgaagtactggtggaaaagaccgcaagtttaacgagttgcatggtcaaggtactcccaccttgcatcccgagtgagctaccttttaagttgccgactgcagccccaagaatccggtaataatcgacccccttatgcttgtaaaaacggcgatcttcgattgagacgacggcattcttaagtgtggatgggatattactagacttaacgtattcgtggtcgttagttcccaaagaggtcaaatacttgtcgttctggtcataaatcttagcggtccccgtattgacaaggtcactctgtttgactgttggtgccgtctgcgcatagtagaagaaaagtgctagaccagcgagtaccccgatgacaaacagtgcagctaaggataaaataatccgccgaaaccagtgtttcttaggtggtttaggttggctttttctgcgagcaacccgtgagttctgttcattgttacctgccatgatgttctcctttaatgaattgatgaggtctcatcaataatatgatcaagcgcatccaaatagggaatgcgtggattgatttgataatgtagctccgcggctaaatgttcaatatccgtcagtggaattgacttgcgaccaccatctccttgatgatcccaataagtaaataagtcgctggctgttaacaaaaataggcgccccaaactcgcaaaccgaatgataacaaaacagattccgctttgagctaagcactggcgcatgtgcttaatttgatgctcatgaaagttttttagcggaaaagccgttttgttcttggtctccttggcctcaaaatctaaatacttcccccgatagacaccgttataatcagtagtagaagcttgtttaaaataagcttcgcggattacagcggcgctgcgtttgggataatcgactttaacgatttgaatgggcgttggctttttatgaataactgcgatattattttcaagataataggcgttactatcattgatttcttgttccaagctcattccacgatcgccaaaattgacgttggcaaatttggaagatttcgatttagttgggccgggttggcgataaacttgaccgtttggatagcgaatcgtcacattaatcaacctcctaataatgttacattttaccattaactaatagggaatgtgaaatatctgtgagtttttaactgatttagaccgatttagtgacagaaaggagacttttttatgagccggttgtggcttagtggttaccggagttacgagttgaatgtctttggtgatcaggatgataaactaaaagttattaagtttgcgttaactaattacttaacgacgcagatcgaggatggtatggattggctgataacgggtggtcagctcggtattgaacagtggacagcggaagtagggttaacgctcaaaaagacatatccagaattgaaagtggcaatgatgttaccatatggtgaatttggtgggcgctggaatgaaaataaccaagctaaattacagactttgctggcccaagtcgattttcatgcaccagtcagtaaacaaccgtatgaaaatccgcaacaattaaaaaattaccaagaatttatggttacccatacggatgcggccactctggtatatgatccagataaccccgggaaacccacgtatgactatgatttgattcggaactttagtgacactcatccgtacccattgaccctgatcgacttcgactggttacaggaaagtgccaatgaatatgcagaaaaacagaataatggttttaattttgaataaagtctgctacaatgttttaagtaatgcggatgccgaatgggtatcgcgcgaataacaatgaggtgtttttaaatatggctaaacgtaattttactcccaaagacatccttcaaaaagagtttaagccaaagatgcggggttatgatcctgccgacgtggacggcttcttagataatgtcattaaggactatgagtcatttactaaagataaccaacaactttcagatgaaaatgaacggttacgggccaaggttgacgagcttaccaagcaagtcgctgtcggtgcaaccagtccatcttctcaaccgactagtacggtgacgaatatggatattctgaaacgtttgtctaacttggaacgtcatgtctttggtgcccaattagataataatcaaaatgaatcacaccgtctataattgtgattcgatgtaaattctgggtaatcgcggtcggcttatgtcggctgaggaaggtccatgctcgcacaagctgcgatgcttgtagtgttcgtgctcggtgaaaaaataagccggggtaccgatttatcggtaacggcggaaaaaacggctaaggcttcggctatgcccgagtattcctgaaaagtgccacagtgacgatactcaattggaaacggttgagttggaacgcggtaaaccccacgagcgggcaacccaaactacggtaggggcgcttcacataaggaactgaactaaatgtggggggagattagtaatctcgagatagatgattaccgcctagttaacagaccctgtactttaactaggtacaaaacatggcctacaggaatttacatttagacaggagactgggacaaaagttcgcttttgtcccagtttttttattcgatcagttagcaaactagcaacttatgctaaactaggtgaggaaaccaatttagtggaaatatttactcaacaagatgcgcctacagaacaggcgtcgcaggaggaaactatgcaagaatttagattaattgccaccgccgctagcggaattgaagcattagtggggcgtgaattacgagatttagggtatcaagttcaaactgaaaatggccgggttcgatttaacggaacgatcaaagatattttgcggaccaacttgtggttacgaacggctgatcgaatcaagatcatcgttggtgaatttgatgcttatacgttcgatgagttgtttgaaaagactctcgcattgccatgggaccagttattgccgatggacgctgaatttccagttgaaggtaaatcgcgcaactctaaactccacagtgttcccgacgtgcagtctatcgtcaaaagggcgatcgttaatcagttagccgatacttatcatcggagcgggcaccttccggagacaggcgctttgttcccattagaagtggctattaataaggatcacgtgttgttaacgctggatacaactggctctagtttattcaaacggggttaccgagtcgaaaaggggggcgcacccttaaaagaaaacatggccgctgccttagtgatgttagctaagtggtatccggataatccatttgttgatccagtttgtggttcggggacgattccaatcgaagccgctttactggcgcgcaacattgccccggggttcaaccgcgcatttgcgtgcgaaaagtgggactgggttcccgctggcctgagtcaacaattgagagacgaagctgatagtttagccgattacgacactgagctggatattagtgggtacgatattgacggtaaaatgattgatatcgccaagctgaatgcgcgggaagccgggttgttgcatgacattcatttcaaacaactggccgtcaaagactttacgactgacaagatcaacggggtcctaattgcgaacccaccatatggggagcggctaagcgatcgggatagtgtccggattctctatcggcaaatgggccaagtttacagtaaattgccaagttggagcaagtatatcttgaccagtgacttagaatttgaagacttctatggacaaaaagccacgaaacgccggaaactctataacggtgcgttacggacagattatttccaatattggggtaaacgaattcggccagcacggacggaataagcaagcgacctttgttggtaaaagtaggtgaaaaatattggcaaatgaaataccgcggtctgaagttgattcccagcagctattagtatttaaagtgctggctgacgtggttagactgaacattgttaagtatttgaagctgcaggatcaggccgttacttgtgggcaagtcggacaagcaatggggattagtaaaaccgctggttcatatcattttaaattgctggaaaaagcaggattaataaccgtcaaaaaagttgcacgtgaaaaatacgtcatgttgaaccccaaaacttttgatcactatgttacccatttttatcaaagcctttaaattgctgagtattttgggcggtcttcaactgtgattctgactaataccagttcttaagtgccgattggtcttttgaactggtatttttttgttgccgaatcgttagtgggatggtacgctgtaatagttcaaaaatatttgaactattgtgggtggccacccaactaaatctaagaaaaagattgacatagtagatttaaactttgtgagtaggcttattcagcattggtaagtctgaataaatgataatggggcggaaaacatggaaaatcgacagcgacagtttggctggttattagcgttaacttcattaggcttttttatggcaatgatggactcaatgattgtgacaacggcgtcaacagcaattaaaattgatttcgacatctcggaggccagtttacagtgggccctcaacgcttacaatgtcgcgattgcagcaacgttacttgtgggcgttgcattaggtgatcgctttggacgccgccgggtttataatctcggcattttagtttttacgctgggttcagtgttttgtgcattagccaatcgaatgccattattgatagtggcacgtgtcattgcaggtattggggcctccgtcatgacaccgatgtcaatggctattttaacggctgcagttccagttgcgaagcgtgggaaagctttaggaatctggagcggtatcggtggactggcactgattgtcgggccggctctgggtggtctaattgtagctaaattaacctggcagtggattttttggatcaatgtgccacttggcctgattgtcataggattatcccggttctatttaccagaaagtaccggggtagcaacaccaattaatttaacggacgcaggtctttcaatgttagcgatgaccgcaatcatttgggccttagctgccagttcgactagtattaatggacttggtccgttcgttggcctgataattggcttagttgcaggcacttggtttatcaagcgacagcaacatgtcgttgcaccgttaatgccgttaacgctttttaaaaagcgtatttttacgatgggaaatgtggcgacttttttattatatgccgcgatgtacggagtcgttttctttttaccccaattcttacaagttgttcagcatgataatgcgtgggaggcaggattgtccttattaccttggactgggacactagtattagttgcgccatttgctggcaaagctgtggacctctacggggaagcgattgtggcagttatcgggctattatctcaaacatttgggtatttcatgcttggttacctagttgccaaccatgttgcttatgttatgatgattgctccgctggcaattgctgggatgggattgtcaatggcgggccccgcgttacagcatgcagttttgggggggagtgtcaccggcagttatcggtaaggcagccggaatttacaacgtttttcggttacttggaggtgcggctggcacggcaattgctgtggtggtgtttacagtgagtagtcgggtacctgcgatgaatgcaattggctttcaaacagtcatgtttagtacagcattgatttcagctataggcgccggttgtgcttggcaaataagaaattcaaagaacttgtagctgacaataacgatcattacaatgtgtgacagatagtttgagtagccttaaaagagcgtgtttaatcgggtgaccgactaagcacgctcttttaaggctaacgttaaccatggttgagcctttgataattaatttaaataataatcgaagaaattagcaactttgttcatcagaggcactttgaccagatgtttggcttgataacccgtgataaatgccacttgttcagcatacggggcggtatgcacgcggtcaaagaaattacgagactgtgaataaggaatccgttcatcctcagtaccatgccaaaataaaagtggccgatgattgatggtttccggttgcaggttaagatcatagtgatctagccaactcgtcaatagggctaaatcactgggaatgtaataagcatgggcctgcgtatgtttgcggactaattgggcgtacgcgttcaggttaggggtccccataatgattgtggctgctttaatttcaggatgatgggtcaataaagccccggtcgtcatgccacccattgaataaccgccgacaccaatctgctcattcaaaatgagtttacgctcccggtagtaattcacaattagctcgaattcgccaagattaccttggatactgttccaaaaagtaaatgaaggaatctggctaacgatttggtgtcgttcaccgtgattcatggcatcgggcaagacgactcgtaaattcttgcgagccagtttacgtgcttgggtcaagacgagttctttattggactgccaaccgtggtaaaaaatcactagtggcagcggttggtctaaatgggttgtagtaacaacttccagcgcaggcacatcttgaaagtgtcggttagtaactttgatcatatttatcggctcactttattaatattatgattaagttaactgtgccagaaatgactgctgaatacaactgatagacttgtttagtcaatatttggtcttgttaattgttagtgatgttaaaataatggtaatcgcctgtttattaactagaattacggcctctaaaaagtaatcttaaaacggaaggtgttataaatgaccgaaatcgaaacggcactacttcgggaccgaaaagcaaaagtccagcaatattttgcgatgtgggtcactcgtgattttgaagcgttaccaagaatatttgcggtcgattgttattatcaagaatgctatggaccagcatatctatcattagcggaagttcaagcctggattgaacatcaattaagagttcaacgggtaacggcgtggtcgattcagcggttgtggtcagtaactgacaacatgatctttgcccagtggtccttcaccgctgttactgaccggatgactcagtttgatgggctttcggcagttcattttaatttagcaggacgtatcgacgatttacgagagtatcagaccacgactgcgcatgattatccttatcatggatccgtgctgtgatatgcgaagcatgtgtgtcataatgtaagcgaaatcattttgagcgttgggggaatcagtatgcaagttcaagtttctgttattgtggctgcatgtaatgaggagcactggttaaggcgttgtttgacctcataaaaaaaacagacattagcggccttagaagtcattattgttgatgatggtagtacggacggcacggctgcaatttgtgaccaatattgtgagcgctggccgcacctatttcgggttatccatcaacgtaaccaaggacagggacctgcacgtaatgcggggattaccgccgcgcatggtcgctatttaggttttgtcgatgctgatgattgggtcgaaccgacgatgtatgcgaccttagtagcaacggctgagcgtagtcatgcccaaatcgtcgtttgtgatgttcgtaaaatctacgcggcgactcaccgcacaactagtctgctgagcttgccagatgcgactgatcacgtggcaattgcggcttatcttaaatacggtctaaataatgcttattccggaaataaattatatgcacgttcgtgttggcagaaatatcgttaccagcggatggtctacgaggatttagatattttgctggacatgttgagttgctgtgagcgagtcgcatatgtgcaacaaccattttataattattataaacatgctggttcgacaactttagattataccaacccacgactgtttgatattatgacagcctatcaagatgccattgagcacgccaaggtgacgtatcaggatgcggtgacttattgcgtcgctaagcgaattttgattaatttagcaacgccaggctttgccgattatctagcggagtttattgaactgatacgacaattgcgtcctacttttgaagccagtccgtcaataatgagtgatccggctattaaaaaaatttgtgattatgtaggtcaattgacattaccccggcgatttatctgtgagcgtgaggactgggctcaatcgtggcatcagtatagtcggaatttcaaaacgattataccggtagctaaagcattgccggccgatttacgacaacggtctaaccactttaaactcgattattggttgttgaaaacgttatttgaacaaggtggcttgctgattttgggtaccgtcaagttgcaccgaccgtttgggcgtttacgggcgggaggtgacgtgttagcctttgaaggtgaacattgtttattagttggtgcgcaaccacgttctccactgatttctgaattactgcaacagttgattgttggttccgagtcactaacagagttgctgacaatggttaaggcacagccagaacgatggtcagcgggtacgcataagattcgcttggttgacataaaagattggctacaatagggcgacgggtcactgagtcatgcagagcagcggactcagtgacctatttagtcattggttacattgaaaatgaataaaaactaaatagcaatttaaaatattatataatgatgataaaattaattttagattaaattaagaaagggtgaaaatatgttaaaaccagcaccattgcacgttggtgaccacgtggccgtcgtcagtctttcgagcggcacgctcggagaactcacgcagcagcatcaattgaatcgggggctaaaacggatgcgccaattagggctcgtcccagtcatgatgccgaatgctttgaaagggcgactgattttacagcaacgccctgaattaagagccgccgatttgaaggcggctttcttagacccaagtatccgtggagttgtggcggcaattggcggtgatgatacgtatcgaaccgtgccatttttgatggctgatgagcagtttaagacggcggttcggcggtcgcctaaactgtttacaggcttttcagatacgacgatcaatcatttgatgttttatcagcttggactgcaaactttttatggccccaattttttaagcgacttggccgaattagggccgacgatgttgccgtataccacgaagacttggcagcgttactttgaaaatcctcagcagacaagcattattagcagtcccgtgtggtatgacgaacgaacaaatttcagtgaatcggcgcagggaacacggcgcatgacccacaccgaaatgcaccattacgaagtgttacgtggtcacgggacaatcagtgggacgctacttggtggttgcctggacagcttttatgatttattgaccacgacccgttatccagacgaacggcaagttgcggaacagttcagactgattccatgtgcagccgaatggcgcggaaaaattctgtttatcgaaacgagtgacgcgcagccgcagccagatttgttcaagcggatgctgcagcgaatgcgacaagctgagattttgacaaacgtagccgccgtgattgtaggtaagccgcagaatgagcattattatcaggaataccgccaaattttgatcgatgagacagccgatttgaaattgccaattctgtacaatattaattttggtcacgcttttccgcgaacggcacttccatatggggcgcaagtgtgtatcgattttgagcaagccacgttaaaaattttagaaccttggtttgtggaagcttaagtagtcattgttaaattggtatcggcagacgatcaaaaagatattctttgttcattgcaacgagcaaagaatagtgcaatacgagaggagttgtcatatgaaattacaaattcgacgttttaaaactacggatgcgccagcagcggcggcactgattgcgcgcacattactgacgagtaatcagggtgactatcccaaagcatacttggatcggctcattacccagatgacaccggcttggctatgccaaaaagctgctgcgacgcacttttatgtcggttattttcagcagcaactcgttgcgaccggggcgattgggtcatactgggggcgcccaggtgagtacagtctgttcacgatttttgttgatccggaggttcaaggcatggggggggggcgtcaaattctgcatacccttgaacaggatgtctatttcagtcatgcccaccgtgtagaaattccagcgtccgtgactgcgcacttattttaccaacacttcgggtatcgacctaagcctggaggaatctacccggatgatgaaggcctgtatcgattagaaaagtttccacatgaatcatttcactagtaaatcacactttcctgcattggtttataatgtaaacaaattgtaaagtgactgcaatcagtttgagaacttatctgcacattttatcggtaggataaggtgtgcagtaaacgtacatatcaaactaatgatgggaaggcgagtaatttggtcatgcagaaaaagtggcggttgatactgctgctcgtgggttgttttttaggtggtatcggagtcgttcaggcacacgcggcggtgccggatatctcagagtggcaaggtcagttaacgagtaccgaggttcaaagtttgaagagtcaggctgattttgtcatcaaccgggtgcaatatgggagcagttatgaggatctctaccacacctctaatgagagtctctatgtgaaatatggtgttccgttcgggtcctatgactatgcgacctttacgagtaccgcgactgccaaagccgaggcagataagttctatcaacgcgcaaataagaacacgaagttctacgtcttggattttgaaacgacttccatgagtagcacggcggccaacgcggctgtcaaggcttggtatactgagatgcggtcgttaacgagcaagaagttgattttttattcgtaccagtcatttgcaaccacatacgccaacacggcacggcaaagttttgatgcccagtggattgcaaattactcctcgaagccgacgatttcgttctcattgtggcaatattccagtagctattatttatcttcgctaggacaatatgttgataacagtttgtatgacagtgcttccgtgacgacataccacccgttaagctggtggacttccgggacttcggcatcatcgtcgaccagttcaactagcacgacgtatgcctacagcagttatacgaaagggcaacatgtgtacctcaataatggggcgtcgagctattatgacggcacaaaagtgcccagtagcgctaagaaaaaatactacaaggtcacagcaaccaagtcagtcactaagagtcgttccaagcagctggtttacttaagtggtctaaataaatgggtcttatcacaggacgtcaccggctattgggtcggccaacacggattatatcaacttcgtgaaaagagcactttgttcaaagatgttaatttgacaacctcgacgggtaaaaccttgaaaaagggtggcatctacagtggtaaattggttaaaagtgggaatttctatcgaattaaggtgagtggtggttatatcacggcgaaggtctccaaatctgatcattggtactatgaatcagtaccttccagtggctggatcaagactaaagtgggactctacacctataaatcttcaaactttgttaagtctaatcgacacgcttaccacgccgctggtgatcgaattaaagtaacgaaggtttacccacggtcgggtggctcacgctattatttaacgaataaagggaattacgtttcagccaaccgctcaaacgtggtcacacaataagtcaattaagtcgctcaaaacgagcatagccagttgattactaaacgactttcagcaagttattagctgaaagtcgtttttttgaggaaatacgtcgattggaagtacgttaagattaaaaagtgctacacttattttaattatattttaatcttgtgggggtgggaatacaatgaaaattgggacattttctgcatcaacgccgattacggcattatcgccaaaccgttatgctcgcgcacgacggttcttggcaacccaaggagtgaccttagttgccggtaatttgacgggacgacgggatagttaccgtgctggttccatcaaagaacgggcggccgaaatcaacgcgttaattcatgatgattcgctggacatcttgatggcaacgattggtgggacgaacgcaaattcggtgctagcaatgctcgattacgagtatctcaatcagcatcccaaaacaattgtcggttactccgatgcgacggccgtgttattggcggtgcaaacgcacgcgcctaattgtcgtgtgatttacggaccggccttagtagcctcacttggcgccttagagtcagagatcgtgacaaccacttggcagaattttctgacagtctaccgcgcagcaccggggcaggccgtaaccgaacaggcaccggcacagtggacggatgaagcggtcaattgggagacctttgaacatccgaaacacatgcacgcaaatacttggcattatacggcgacccccattttgactggccgtttgatcggtgggaacttgaacaccatgtacgggttctttaactcaccttattttccaaaattaactggtaacgagcttttatttattgaagatgccgagaaaactgcagcaacgctggaaaaaaatttcgtaatgttagcgttggctggtgtttttgatcaaatctctggcattattttgggaaaacacgcgttgtacgatgatcaaggcagcgggcggttgccaatcgatatcttacaggaggtgctgggggatcgccaattaccaattatttacgactacgatagctgccatacagtccccatgctcagtacgccattgggggcggatgtccggattgatgcgcaggctcgaacggtgacgtttagtcatttttagactaataatcgttataaattagtccaaaaccgcgaaccacaacaggtagtcaacggggttgtagttgatgttgccaggttgttggtgagcatcaaaacataatgagttgggagtaagctcattcagtcggtgattggtcagactcgaggtccaagaaaaaacgtttttgaagcttagtcgcggtgtaaccaatttgctgataaaattggtgcgcgccttggcgttcgataccggaattcaatcgaataccagcgacgtgataaaggcgcgcttgttgtgccaatgcggtcattaaggaacaaccaacgcctcgatgttgtacggtagtgctaacggcgagtgccaatatattgaatagtgctggaccatatgtttctaaataaacttcagcatggacatagccaagaacttgttgatcattggcgctggtcgctgctagcaagatatgccgctctggttgtgacagtaagcgagctaagttttgagtcgtatttattaagggatagtcatagtttagttggtcagcgtttaatttctgaatcgtaggggcatcagtaatttgaacagctcgaatcataaatgaaaccttctttcgtgaaaattattctcattgtacgcttatcttattcagaatggtagtcgcagaaaactttgtaaaccggccatacttacatgcctgatataagaatacttgctttttgataaatgataaacatataataaaacaattagattaacaaaaggagtgtgatggtgatgcacaaatatagcattcaagtggggggctacacgcagtatttttttaaggtcattcgggatactcccggggtgttaatttacacgatctgtttgccacttgtctttttaatcatgaatgtcagtagcgctttctttaaacctttatcgctgacaacttatacggctcaagtcatgccctacattggttggatgattttttcaaattgtctaacgactgccagtaatgtagccattcttcgcgagcagggttatctcaaacaatatcgaaccttggtggttagccccgcagtttttcttgtcagtcaagcgctggtcagcttgggtataattttgatgactttattgttggtggccctgttgagcgcgattactttcaagttggcctttttatcgttgctaggtcgcttatggttgaccgtgttgcttacgtatctaccagtcacttgttttggcttacccttgattgccttggcactccgacgtaaaactgtcgatatgattggaaatgcactggcgatgattatcgtcgtgggtacctttatgttaagtaacatgctgacagtgtctgccaataacccattactcaacctggttagtcccatttacttagttaccaatgtttttgcgatgatcagcgtgggccccgtcagccactttatgacgacttatcttctgagtctgattgtattattggttatcggcggatttagctatcggcacattaagattctgccaacggagggcttataatgatgcgtgttgagcacttagcatattacttttcaagaaatgggcaaccgttcttcaaggacgtgagttttcaattaaaaagtcccggtgtcaattttttgattggtcaaaatggcgctggaaaaacgacgctggctgatatcatcactggtttgcggccggcacaaggtgaattagacctacctaaagcagccatttatttgaaccaacaactcccgttactgtcttcaattcgtgtgcgggacgttgcccaactggttttgggcatcgagcacggacgactacgattgacaactgaacagctccaacaacttattgatacccaagcttatcaattcttggccccgttgtgggatcagcattatggtcagctttctgggggccaacgcaaattagttcagttattgctgttcttacaagttgatcgcgaattgattgttttggatgaaccaacagcagcggtcgatcgggaaaacgtgcagttgttgtttcaggtcatgcaagcccatcctgagcgaacctacttgatgattacacatgacgttcgcgaccttcatgcttttacagattaccaagtgctgtggctcaatgatcggcaggtgacgacactgtccaagcgaacgtttgaagctgcgagcgcgcaagctgactttgttgcgctcttcaaaacgcagtaatataacagtaatggctcttgcgccgcaatggcgacacttattttgagtcctttggcgctcaagttggcctcgctggcaagtctcataaaatgacactaaaaaacggtactcagattagtttgagtaccgttttgcgtattattggtgagcgtacctagccaaagtaataaatataaccgatgatcaatgcccagataacgatccataaaatactgaatgccaacttgaagtaatacaaatgaaaacgaaaacgacggaagcggtcgctaccggccaatttgaacgtcaaggtcttgttatctaataattgcaagtaatcatagaaacggggaagccacacaccgcccgctgttaacacgattaacaatccgatgatggcaaacgccgctgcggggtaaacgatactggtatcgaccgtaaaggccggtgcaagaatgttggcatataacaaccataaagcatacaaccccaacgcgtaaccaataatccgaacaacattaacgataattagccgtgactttaagtccggttgttgttgcatgagtgcctgattcgcatgataatgctgggtgccaaagcgcccgctgaccggaatcaagtatcggttttgatgtaagtatggcagttgtgctaacagcgtgatcaatgccacaactggtacggcgattgccaccaccattagtaggtactcaatagtgaccatgggaacggtgctgacccggtaggcccaactaatccaaccaatcaggatgaagacgtctaatgccaaaaccaaccaaatctgaaagcgacgatagtgttcaaacgtggcggtatcggctagctgccaatgatggtcttgagttgagtgaccaatcaagtaatcataactttgcgtcggccacactaaggcgggaatcattagcaagataatgccaacgatcattaaggcgatgcttgtgacaacactccgaatcggaaaaatcaacagggttaattttgcgctgaccaagtagcaactgactagtaaactgataacaccgagccaccagcaagctgccattccataatataaccatttcaatcgtggtgcttgatcggtcacgtgttgccgcacttgatgttgcaattggagctgtgcgcgcggcgccagggttttagctggctggatgaccggatgctgaagattgtggtattccaaccaacccatgagtcctaacaataaaactaaaagaatccaaacaataactaacatggcaaaagtcctttaaaacaatatagtcgtgcatattaataagtgtaaaacgaaaatatggtcaaaatgtgacgattatttaaatcttgtaacttttttaatggtcagttgatttaacgaagcggttaaaaaccattttctactgatcagttgtggactagactatgcatgactgattgtaaagctgtgttttatctgtaataaaaaagcatttggaactacttacgatgtctgtcattgtgggaggcaagtaatcatgaatcaattaatgacggaattgggacaagtgtactatcagtaccgaccggcgggaccacaacagccgacgttgatgtgcttaccggcgtttggctgggacgccactgattataattttaagcatttaatggcacgattgccaagtcaggtgggattacttgccatcgacacgattggcgtgggccgtagcattcatagtcaaatggtgcgcactgtcccgcatattttagccaatcttgaggatgtggttcaccatgaacacgtgagcaacttattattggtgggccacagtttaggcgctagttacgcattcttatatgcccagcagcacttagataatgtttgtggcttagttttgcttgaaccaccctatgccgcgatggcaccacaacttcttgcaaacgtccaatcttttattgaaaactatccgcaactagtacaacagcgacaaactttgacacttcagcaactcttagcagaagttaatcctttaaacctactggcagaacgtgtcgccaatgcccgtattgatttagcagcttacgcgaacccgagtattctgactgaagcgcaatgcttaccacaattagtaacgacgcttcgaaccgctgaaaagcgggtactgacgctgccaatccaagttttagtcactgaccaacgcttgacggcgtaccaacaatcaccgtggtgccagcttggtcacctagttcatgcaccaggtcagcattatttacactggacgaacgaaaattttgtccggcaacaactattgattgctctgtcccagtcatagggggcaaagagccagtccacggtattaaattaatcgctgcaaagctagtactagcaacatctaccaatggtctgactttaatccaactgaatcagccacccgcaacaaattcgagtatgctaaaatgaaagcagattggttgtggaggcgttggaaaatgcaaaaacaagtaacgattattggtagtggcattgttggggcggtcacggcgtactatttaagccagaaccctgacctgaacgtcacgatttatgatgaaggtattggtcaagcgactaagaattcagcagggattatttcaccttggttatccaaacgtcgtaatcagcgttggtatcaactcgctaaggccggggctgctttgtatccggaaattgttgcggacacgcaaatgggctattctgtttatcaacaagcaggaacgattgtgactcgtgccgatccagatgatctgcaggcgctatacgatttagctctaaagcgccggcaagcggcaccccagatgggaacgattgagaaattaactgctgaagaagtccaagaacggatcccactgctaacggcgccccaacccggtgtgtttgtgagtggtggtgcgcgggtcgatggcgataagtttgcacataatttactgaaatacgctgaaaagcggaacctggtccgtcataaaggtaaggtacgtttaggtgaccagggccaactattgacggttaatggtcagcaaagctatgacacgttgattttagcagtcggggcgtggctaaagccgttattgttgccaatgaagattgttgcggatgttcggccacaaaaagggcagttgattgaaatgcagctacctgagacttgggctgacgatgttccagtgctcatgcctgaaggtgaacgagactttattccctttacgcgcagcaaattggtcgttggggcgacgcacgaaaatgatcagggctacgatttgcaggtttcaagtctggttgaagatgatctctttgctagcgggctcaaacttgatgccaacctgactaaggatcaaattacgcaggtaaaagtgggtacgcgtgcctacacgcgtgactttgcgccgttcttcggtccaattccggataacccacatattttggtagctagcgggttaggttcatctggtttaacaacaggacccatgattggtaagctgttagccgattatgttcaaactggtgctcatgactgggaccagtatcaacgatcaattgaaacttatttggccccggctgattagtcactaagatgtaagccttgttgtgctaattgatgggcgccatggttatcactttcggcaatccactgggtgattactaattggcactggtcttgcaggtgcagcaaagtcgccagctcgacactgaaagttttgctgtaacccttggcgacactttcggcgacgatttgactatccgtatagaaaaagacgctgacttgcggaccataagaatctaataaagttttaaagccagcaatggcggcaagaaattctgcggtatgattatcactgtctggcaagacctgtttgaattggtgttgttggccctgatcaataattaagattcccgcggcactgcgctgattatcgggtgtggtcgcggcatccgtatataattgcatcaaactcactccaatgtgaaaggaattttgtactgtgaataacgataagcatacctttaaataccaaccaatgctagcgtcaagtgttatcgtctggtcgtggacggcactagtattgatggcggggattattttgtggctagaaatcttgaagtttaagtggtggttactcgtcattgcggcgctctttattgccttggtcgcgattcaaatcagcttgcggcgcgtaacaatcaatcataacctcattatttttagcacggtcttgaaccattcttggcttgtgattccccgtgatcaactcgaattgatcgtcccgatacgcggtgggttgaaagttcaaatcgatggtaatcaatatcggtttttgatgttgaaaaaggcgcgcaatcagttgattggcctagcaactagtcgatagatacgaataaaaacaataaatatacaaataatgttcataatttcaggaagattgttataatggagtaagtaaaaacagaagggcggagaattgatgaaggatattgaaattgcacagcaagtgataccagaaccgattacggcgattgcggctaaagcgggcttgacggttgaccagatcgaccaatatgggagcacgaaggctaaacttaaattaccgttaccggttaagaaaactcaacgcaaccttattttagtaacgtcgattaacccgacgcctgctggtgagggaaagtcaaccgtgactattgggttaggtgacgcgttgactaagattggtaagtcaacgatgattgcattgcgggaaccttcattaggaccagttatggggatgaagggtggcgccactggtggcgggtactcacaagtgattccaatggaagatatcaatttgcacttcaccggcgacatgcatgccctgacggctgcgaacaacacgctcgcggccttaattgacaaccatattcaacaaggtaaccagttgggtatcgatcagcgtcgaattcaatggaagcgcgcgttggatattaatgatcgggcgctccggcatacggtgattggccttggtggtgcaacgtcgggtgtacctcgtgaagatgggtttgacattaccgtcgcgagtgaactgatggccattctctgtctttcagaaaatattgcggacttgaaacaacgtgttaatcgaattgtaattggctacacacatgaccgtcaaccagtgacagttgctgatttgaacgtcggtggcgcgatcacgttacttttgaaagacgcgttacgtccaaatttagttcaaaccctggcgcataccccagcactcgttcatggtggtccgttcgccaatatcgcgcatggttgtaacagtgtacttgccacgcaagctggattgaatctagccgactatacggtaaccgaggcgggcttcggtgctgatttgggtggtcagaaattcatggatattaatgtgccagcggtcggacaagcgcccaatgccgtggtaatcgtggcgacgattcgggctttaaagttacatggtggcgtggctttgcaagatttggcaaccgaaaatgtggcggccttgaaagccggtgcggctaatttaggacatcatatccatgccatgcaacgttatggggtgccagtcgtggtggccatcaacgaatttacggccgatactgacgccgaaatccatgccgtcaaagactattgtgccgatcttggagtcgatgcagtcttggctgatgtctggggtcgtgggggtgacggggcaaccgacttagctgccgcagtggttgatttatgtgctcagccaagtcattttcaaccgttatcaccagcggatgcggatcttaagacgaaaatcaacgatattgtcactaagacgtatggtggagccaatgtcgaatattcagcgaaagctcagcgccaattgagaacgtttgctaagcaagggtgggatcatttgccagtctgcatggcgaagacgcaatactcattgagcgatgatcccaaacgtctcggagcaccaaccggatttacaattaatgttcgtgaatttgtgccgaagttaggtgcgggtttcattgtcgctttgaccgggaacgtgttgacgatgccaggactgccaaaacatccggccgcactcgatatggacattagtgatgatggaaaaatctcaggtttgttctaaagcttgaccgataagtcgatgccagtgggggtcggctttttatttgcgctgtttttggaagactgcgacagcgaatcaatcacacacgtttaatttgtgagctaccgatgatgactaactcgcttagcagttgagcggtgcaaccaatcatcaggctcgttgcttcaactgggggatggttaaccaggtgccgatgcttttgggaggatactcgaaaggtgcttagttattaagtctgcaataaaaaccgcgcttttcctgccggagtttcgtacaaggacgacgtcttttggtataattaaacacagcttagcgaaatgtgaggacagaatatgtggatctatttaattttaatggtagcgctggtcattattgaccaagttatcaaagcagcgattgtgagtcatattgcgttgggtgccagtacgagtattgttaccgggttattatcactcacaaatttacataataacggggctgcttggagtatcttagaaggcaagatgtggttcttctacttgatttcagtgattgccttgatcgtgatgggctacttgctgtggcgcttacgtggcaaatggctatatgaggttggtatttcactgatgattgcgggaactttggggaatttcattgaccggttacgtattgggtacgtcgtcgatatgttccaacttgattttattaattttccaatttttaactttgcggattcatgtttaaccgtgggcgtcatttttatcttgatcggcgtgctgcgggatgatagttttgaaaaataagttacagggagctgataacgtggcaggagcgaccacggaacaacaattcatgattactgaccaaacagggcgcttggataaagtgttagcggcactacagtcggtctggacgcggtcgcaagttgataagctgatcaaaacggatcaggtgacggtcaatggtcagctcgaggcgagcaagtatcacgtcaaaccaggtgacgaaattgtcgttgccgcacggacggttcaacaaacaacgattgagccagaaaacattccattagacattgtttatgaagacgatgatgtcttggttgtcaataaacctcaggggatggtcgtgcatccagcccctgggcaccctaaccataccttggtgaatgccttgctgtatcatagtccgttgtcgacgatcaacggtgaatttcggccagggatcgttcatcgcatcgataaagatacatccggattattgatggtcgcaaaaaatgaccgggctcaccaatcgttggcggcccagctgaaggcgaaaactaacttgcgagaatacgtcgcactcgttcacggagtgattaaagaggatacggggacaattaatgcgccacttggtcggtcaccgaaggatcgcaaaaagcaagccatcattaagaccgggcgaccagcagtcacccattttaaagtactgaaacgttatcagcactatactttgattagttgccggctggagactggccgtacgcatcaaatccgcgttcatttacaatctattggacatccgctggtgggcgatcccctgtacggccccaaaaagacgattaaggggcacggtcaatttttacacgccaagttattgggattcaagcaccccgtaacgggagacttgttgacctttgaggcaccactaccaccgatctttacaacaaccttggctaagcttgacaaaaccgatgggaatcattaatctaacagtaatgagcgtcctttaatccggccctgcgagactgaaaggcaaactgttaacaataacttttcgtcgacggccgtgacaccttgtccggccgtctttctttgtcatacgggttgctcaaaaaagcgataaccacaaattgggaggcaattatgcaaaaagaagttgttgattcaatggcgatgaaacgggcattgacccggatcacctatgaaattatcgaacagaacaaaggcattaaaaatgtcgtcttagtgggcgttaaaacccgcggcgtctatattgcgcagcggattgcagcccaattacaacagcttgaaggtactgcgattccagttggcgagttagacatcacggcatttcgtgatgatcagccgctggatcaagcacggctttcaacggactatcagttaacgttttcggtggcgaataagcgggtcattttagtcgatgatgttctatttaccggccgaacaattcgcgcggctttagacgcattaatgggtggcggtcggccccagagcattgccttggcggtgctagtcgatcgtggtcaccgcgaattgccgattcgcgctgattttattggtcgcaacattcccaccgcgcgtcaagaacgcatcaaagtgacggtcaatgaaatcgacggtcacgatggtattgaaattattaactagtacgacaaagtcaaacagatgagaagggatcgcaatggcagaccgctatttgattcttgaagatggcagcgcctatttaggtgaaggctttggctcgccagcggtttctaccggagaaatcgtcgtcaacacgagtatgacgggctatcaagaaattattactaatcaaatttatcataatcaaatcgttgcttttacgcagccaaccattgggagctatgggatcaaccacgatagctacgaatcaattttaccgaccgttaagggggtcgttgttcgggatgttgctagcatttcgaccaaccggcagcggcgctggtcactggatcaatatttaaagcaacaaaatattcctggcatcagccatattgatacacggcacttagcgaagcaactccgagcaagtggcccgatgaaagccagtatcgtagacgttgcagatgcccatgcctttgatcaattgggtgcgaccgtgctgactaatcaacaggtggcagcggtcgcaacaccgaaaccatttcctaatccggggacggggctcaatgtcgtggtcatcgactttggcctcaaacacgggattttgcgcgaacttagtaagcgtgcttgtaacgtcacggtcttaccttatacggcaacgactgaggaaattttaaacttagatccagacggcgtcattctatcgactgggcccggcaaaccgcaggacttaccagccagtgtgactgagatgatcaagaacattcaaaatcgggtgccactgtttgccatcggactgggccacgaactatttgcgatggccaatggcgcccaaattatgaaattatcacctgaacatcatggggctaaccacccaatccgcgaagtgattacgaaccaaattatttatgcagctcagggccaggggttcgcggtagatgcggatactgttgatcgtaataagttaatcacgacatttgttgacttgatcgatgggacgattcaaggactgcgtctacgggactttccagcgttttcagtgcaatttttcccagatggcgctcctggtccgactgaaacgcgcgatatttttgatgaatttgttgagtcgatgcaacaagcaagggggccaatctggtgaacaatcaagccttacaaaaagtgttgattatcggcgctgggcataatgacattggccgagagggacaacacgacgcggcggtgacccaaatcggtgcggcaattcggcgtctgggcattgctgttgtcctcgtcgataacaatgcttactccgtggcggctgaaaatcggtttgctgacaaggtttatttagaaccactgaccgtcgccgcactatccaaaattattgaaactgaacagcctgatggcctcattccttcacttggtggcgtccaaacagtcaccctaattcaagggttgattcgcaacaatgtgttaaaaaataatcacgtgaagttgctacagtgggatcaagacgtggtcgacatgattgtcaacccagcgctgatgagcaaccggttgaaagatatgggtgaacccgtgattgcctcacaagttgtggctagcacgactgaggcgatggccgtggtgcgccacgtcggttttccagtgatcgtcaagtcggtcgcaccccgaatcgaagcgagtcgccaactatgtgaagatgaagacgaactgcaacgggcactagcaatgggattcaaagtttcagggaccaaacaatgtattgtcgaacagagtatcgtcggctataaagaactcgaatttgtagccgtccgtgatcagaaggacaccgcgctactagtcagtgggatggaaaattttgatccagttgggattcactccgctgattcaatcgtttttgccccaacgcaaacgattacggatcaagaataccaacagtttcgctcagcgacactcaagatcatgcgcaagttacacttgaccggctcttgtcacgttcaatttg
